(19) United States
(12) Patent Application Publication
(10) Pub. No.: US 2007/0054289 A1
(43) Pub. Date: Mar. 8, 2007

(54) Identification of genes involved in fertility, ovarian function and/or fetal/newborn viability

(75) Inventors: Jose Cibelli, East Lansing, MI (US); Javier Crosby, Providencia (CL); Emilio Fernandez, (US); Arif Kocabas, East Lansing, MI (US); Guilherme Jordao De Magalhaes Rosa, East Lansing, MI (US)

Correspondence Address: HUNTON & WILLIAMS LLP;INTELLECTUAL PROPERTY DEPARTMENT, 1900 K STREET, N.W., SUITE 1200, WASHINGTON, DC, 20006-1109, US

(73) Assignee: Michigan State University, East Lansing, MI (US)

(21) Appl. No.: 11/437,797

(22) Filed: May 22, 2006

Related U.S. Application Data
(63) Continuation-in-part of application No. 11/091,883, filed on Mar. 29, 2005.
(60) Provisional application No. 60/556,875, filed on Mar. 29, 2004.

(51) Int. Cl. C12Q 1/00; C12Q 1/68

(52) U.S. Cl. 435/6; 435/4; 800/24

(57) ABSTRACT

A genetic means of determining whether a female subject produces “pregnancy competent” oocytes is provided. The means comprises detecting the level of expression of one or more genes that are expressed at characteristic levels (upregulated or downregulated) in cumulus cells derived from pregnancy competent oocytes. This characteristic gene expression level, or pattern referred to herein as the “pregnancy signature”, also can be used to identify subjects with underlying conditions that impair or prevent the development of a viable pregnancy, e.g., pre-menopausal condition, other hormonal dysfunction, ovarian dysfunction, ovarian cyst, cancer or other cell proliferation disorder, autoimmune disease and the like. Microarrays containing “pregnancy signature” genes or corresponding polypeptides provide another preferred aspect of the invention. Still further, the subject invention can be used to derive animal models, e.g., non-human primate animal models, for the evaluation of the efficacy of putative female fertility treatments. Additionally, an improved RNA amplification protocol is provided herein referred to as the CRL amplification protocol which is suitable for reproducibly amplifying all the RNAs expressed by a cell sample, even when only a few cells are available.

### CROSS REFERENCE TO RELATED APPLICATIONS

[0001] This application is a continuation-in-part of U.S. Ser. No. 11/091,883 filed on Mar. 29, 2005. This application further claims the benefit of provisional application No. 60/556,875 filed Mar. 29, 2004. Both of these applications are incorporated herein by reference in their entirety.

### FIELD OF THE INVENTION

[0002] The present invention provides genetic methods that provide for the identification of “pregnancy competent” oocytes, i.e., oocytes that when fertilized and transferred to a suitable uterine environment are capable of yielding a viable pregnancy. The present invention further provides genetic methods of identifying subjects, preferably human females having impaired fertility function, e.g., as a result of impaired ovarian function, e.g., as a result of age (menopause) or an underlying disease condition.

[0003] Also, the invention provides methods of evaluating the efficacy of a putative fertility treatment based on its effect on the expression of specific genes.

[0004] Further, the invention identifies genes which are differentially expressed by cumulus cells that correlate to pregnancy potential of oocytes that are associated therewith.

[0005] Further, the present invention provides an improved mRNA amplification protocol that is especially suited for gene expression profiling of biological samples of small quantity, such as cumulus or stem cells.

### BACKGROUND OF THE INVENTION

[0006] Currently, there is no available genetic procedures for identifying whether a female subject produces oocytes that are “pregnancy competent”, i.e., which when fertilized by natural or artificial means are capable of giving rise to embryos that in turn are capable of yielding viable offspring when transferred to an appropriate uterine environment. Rather, conventional fertility assessment methods assess fertility e.g., based on hormonal levels, visual inspection of numbers and quality of oocytes, surgical or non-invasive (MRI) inspection of the female reproduction system organs, and the like. Often, when a woman has a problem in producing a viable pregnancy after a prolonged duration, e.g., more than a year, the diagnosis may be an “unexplained” fertility problem and the woman advised to simply keep trying or to seek other options, e.g., adoption or surrogacy. Therefore, providing alternative and more predictive methods for identifying women with fertility problems would be highly desirable. Likewise, novel and improved methods for treating fertility problems would be highly desirable.

[0007] Still further, the identification of women with fertility problems, preferably earlier on than by current methods is desirable, as fertility problems may correlate to other health issues that preclude pregnancy, e.g., cancer, menopausal condition, hormonal dysfunction, ovarian cyst, or other underlying disease or health related problems.

### BRIEF DESCRIPTION AND OBJECTS OF THE INVENTION

[0008] It is an object of the invention to provide a novel and improved method of detecting infertility problems and the genetic basis thereof.

[0009] It is a more specific object of the invention to provide a novel method of detecting female fertility or infertility which method comprises evaluating the capability of oocytes produced by said female to potentially give rise to a viable pregnancy upon fertilization and transferal into a suitable uterine environment, wherein said method involves detecting the levels of expression of specific (“pregnancy signature”) genes or polypeptides encoded thereby.

[0010] It is another specific object of the invention to provide a method of evaluating whether a subject produces oocytes capable of giving rise to a viable pregnancy comprising:

[0011] (i) measuring the expression levels of genes in a oocyto-derived cell, e.g., a cumulus cell, wherein said genes are expressed or not expressed at characteristic levels (“pregnancy signature”) in cells associated with oocytes capable of yielding a viable pregnancy; and

[0012] (ii) detecting the “pregnancy potential” of said oocytes based on the level of similarity of said gene expression pattern to said “pregnancy signature”.

[0013] It is another specific object of the invention to identify a female subject putatively having a condition that inhibits or prevents pregnancy by detecting whether said subject produces oocytes associated with cells, e.g., cumulus cells, which do not express one or more genes in a manner characteristic of “pregnancy competent” oocytes; wherein said method comprises detecting the expression of said one or more “pregnancy signature” genes in at least one cell derived from an oocyte isolated from said female subject; and thereby identifying the subject as potentially having a health problem which prevents or precludes fertility based on an abnormal expression pattern of at least one of said “pregnancy signature” genes.

[0014] It is another object of the invention to provide a method of evaluating the efficacy of a female fertility treatment which comprises:

[0015] (i) treating a female subject putatively having a problem that prevents or inhibits her from having a “viable pregnancy” and

[0016] (ii) isolating at least one oocyte from said female subject after said fertility treatment;

[0017] (iii) isolating at least one cell from said isolated oocyte, preferably cumulus cell, and detecting the level of expression of at least one gene that is expressed at a characteristic level of expression in “pregnancy competent” oocytes; and

[0018] (iv) determining the putative efficacy of said fertility treatment based on whether said gene is expressed at a level characteristic of “pregnancy competent” oocytes as a result of treatment.

[0019] It is another object of the invention to provide animal models for evaluating the efficacy of putative fertility treatments comprising identifying genes which are expressed at characteristic levels in cumulus cells derived from pregnancy competent oocytes of a non-human animal, e.g., a non-human primate; and assessing the efficacy of a putative fertility treatment in said non-human animal based on its effect on said gene expression levels, i.e., whether said treatment results in said gene expression levels better mimicking gene expression levels observed in cumulus cells associated with pregnancy competent oocytes, (“pregnancy signature”).

[0020] It is another object of the invention to identify specific human genes that are differentially expressed by cumulus cells and other oocyte-associated cells and to assay the expression of one or more of such specific genes by cumulus or other oocyte-associated cells as an indicator of fertility and ovarian function.

[0021] It is another object of the invention to provide a novel mRNA amplification protocol especially suited for biological samples of small quantity that combines the use of specific primers, i.e., SMART II oligonucleotide (Clontech, CA) and T7-oloigo(dT)24V promoter primers (Ambion, TX).

### BRIEF DESCRIPTION OF THE FIGURES

[0022] FIGS. 1A-1C and 1D-H depict schematically a genetic fertility testing method according to the invention. FIG. 1A shows a freshly ovulated egg containing a polar body, zona pellucida and cumulus cells. FIG. 1B shows the fertilization and transferal of this egg into a uterine environment. FIG. 1C shows the recovery of cumulus cells from the oocytes shown in 1A which are to be used for genetic testing. FIG. 1D-H show the isolation of RNAs from said cumulus cells, microarray analysis of said RNAs, validation of 100 genes by real time RT-PCR, correlation of the levels of expression of said genes (upregulated or downregulated) to the ability of an oocyte to give rise to a viable pregnancy, and the use of this gene expression profile to identify a set of genes, the expression of which correlates to the capability of an oocyte to yield a viable pregnancy (“pregnancy signature”)

[0023] FIG. 2 contains a flow chart of the CRL amplification protocol used in the present invention.

[0024] FIG. 3 contains a digital RNA gel-like image of total RNA sample isolated from 8 mature oocytes run 3 times.

[0025] FIG. 4 contains RT-PCR verification of GeneChip array results for samples as described infra.

[0026] FIG. 5 contains selected overrepresented GO biological processes in oocytes identified by EASE.

[0027] FIG. 6 contains Venn diagrams depicting intersection of differentially expressed genes in human and mouse oocytes and ESCs.

[0028] FIG. 7 contains primers and sequences used to validate RT-PCR microarray experimental results.

[0029] FIG. 8 contains selected representations of genes common to human and mouse oocytes with homologs functionally characterized in the mouse oocye (16 genes out of top 100 genes).

[0030] FIG. 9 contains 66 unique genes in common between human oocytes, mouse oocytes, hESCs, and mESCs.

[0031] FIG. 10 contains genes differentially expressed in human oocytes corresponding to the TGF-beta signaling pathway.

[0032] FIG. 11 contains gene that are differentially expressed in human and mouse oocytes that are in the estrogen receptor signaling pathway.

### DETAILED DESCRIPTION OF THE INVENTION

[0033] Prior to discussing the invention in more detail, the following definitions are provided. Otherwise all words and phrases in this application are to be construed by their ordinary meaning, as they would be interpreted by an ordinary skilled artisan within the context of the invention.

[0034] “Pregnancy-competent oocytes”: refers to a female gamete or egg that when fertilized by natural or artificial means is capable of yielding a viable pregnancy when it is comprised in a suitable uterine environment.

[0035] “Viable-pregnancy”: refers to the development of a fertilized oocyte when contained in a suitable uterine environment and its development into a viable fetus, which in turn develops into a viable offspring absent a procedure or event that terminates said pregnancy.

[0036] “Cumulus cell” refers to a cell comprised in a mass of cells that surrounds an oocyte. These cells are believed to be involved in providing an oocyte nutritional and or other requirements that are necessary to yield an oocyte which upon fertilization is “pregnancy competent”.

[0037] “Differential gene expression” refer to genes the expression of which varies within a tissue of interest; herein preferably a cell from an oocyte, e.g., a cumulus cell.

[0038] “Real Time RT-PCR”: refers to a method or device used therein that allows for the simultaneous amplification and quantification of specific RNA transcripts in a sample.

[0039] “Microarray analysis”: refers to the quantification of the expression levels of specific genes in a particular sample, e.g., tissue or cell sample.

[0040] “Pregnancy signature”: refers to a phrase coined by the inventors which refers to the characteristics levels of expression of a set of one or more genes, preferably at least 5, more preferably at least 10 to 20 genes, and still more preferably, at least 50 to 100 genes, that are expressed at characteristic levels in oocyte cells, preferably cumulus cells, that surround “pregnancy competent” oocytes. This is intended to encompass the level at which the gene is expressed and the distribution of gene expression within cells analyzed.

[0041] “Pregnancy signature gene”: refers to a gene which is expressed at characteristic levels by a cell, e.g., cumulus cell, on a “pregnancy competent” oocyte.

[0042] “IVF”: refers to in vitro fertilization.

[0043] “Zona pellucida” refers to the outermost region of an oocyte.

[0044] “Method for detecting differential expressed genes” encompasses any known method for evaluating differential gene expression. Examples include indexing differential display reverse transcription polymorase chain reaction (DDRT-PCR; Mahadeva et al, 1998, J. Mol. Biol. 284:1391-1318; WO 94/01582; subtractive mRNA hybridization (See Advanced Mol. Biol.; R. M. Twyman (1999) Bios Scientific Publishers, Oxford, p. 334, the use of nucleic acid arrays or microarrays (see Nature Genetics, 1999, vol. 21, Suppl. 1061) and the serial analysis of gene expression. (SAGE) See e.g., Valculesev et al, Science (1995) 270:484-487) and real time PCR (RT-PCR). For example, differential levels of a transcribed gene in an oocyte cell can be detected by use of Northern blotting, and/or RT-PCR.

[0045] CRL amplification protocol refers to the novel total RNA amplification protocol depicted schematically in FIG. 2 that combines template-switching PCR and T7 based amplification methods. As noted above, this protocol is well suited for samples wherein only a few cells or limited total RNA is available.

[0046] Preferably, the “pregnancy signature” genes will be detected by hybridization of RNA or DNA to DNA chips, e.g., filter arrays comprising cDNA sequences or glass chips containing cDNA or in situ synthesized oligonucleotide sequences. Filtered arrays are typically better for high and medium abundance genes DNA chips can detect low abundance genes. In the exemplary embodiment the sample may be probed with Affymetrix GeneChips comprising genes from the human genome or a subset thereof.

[0047] Alternatively, polypeptide arrays comprising the polypeptides encoded by pregnancy signature genes or antibodies that bind thereto may be produced and used for detection and diagnosis.

[0048] “EASE” is a gene ontology protocol that from a list of genes forms subgroups based on functional categories assigned to each gene based on the probability of seeing the number of subgroup genes within a category given the frequency of genes from that category appearing on the microarray.

[0049] As noted above, the present invention preferably provides a novel method of detecting whether a female subject, human or non-human, produces “pregnancy competent” oocytes. The method involves detecting the levels of expression of one or more genes that are expressed or not expressed at characteristic levels by cumulus cells associated with (surrounding) oocytes that are “pregnancy competent”, i.e., which when fertilized by natural or artificial means (IVF), and transferred into a suitable uterine environment are capable of yielding a viable pregnancy, i.e., embryo that develops into a viable fetus and eventually an offspring unless the pregnancy is terminated by some event or procedure, e.g., a surgical or hormonal intervention.

[0050] The invention further provides a novel and improved means for amplifying the total RNA from a particular cell sample that combines template-switching PCR and T7-based amplification methods (referred to herein as CRL amplification protocol). While this method is preferably used for oocyte, cumulus, or ES total RNA samples it is applicable for any cell sample preferably a cell sample that is only available in small quantity.

[0051] The invention further provides transcriptome data obtained from oocyte, cumulus, or ES cells that identifies genes which are differentially expressed therein.

[0052] The invention in particular identifies 1626 genes that are differentially expressed by human ES cells.

[0053] The invention further identifies 5331 transcripts upregulated and 7074 transcripts down-regulated in human oocyte sample. Upregulated genes include FIGLA, STELLA, VASA, DAZL, GDF9, ZP1, ZP2, MOS, OCT4, NPM2, and H1FOO.

[0054] The invention further compares transcriptomes from human and mouse oocytes and identifies 1587 genes common (differentially expressed) to both.

[0055] The invention further compares the transcriptomes of oocytes and ES cella and identifies 388 (human) and 591 (mouse) genes differentially expressed in both as well as a set of 66 genes that are preferentially differentially expressed in each of human and mouse ESCs and oocytes.

[0056] In particular the invention provides a comprehensive expression baseline of gene transcripts present in in vivo matured metaphase II human oocytes.

[0057] In preferred embodiments, the inventive methods will be used to identify women subjects who produce or do not produce pregnancy competent oocytes based on the levels of expression of a set of differentially expressed genes. However, the inventive methods are applicable to non-human animals as well, e.g., other mammals, avians, amphibians, reptiles, et al. For example, the subject invention may be used to derive animal models for the study of putative female fertility treatments.

[0058] Additionally, the present invention may be used to identify female subjects who have an abnormality that precludes or inhibits their ability to produce pregnancy competent oocytes, e.g., ovarian dysfunction, ovarian cyst, pre-menopausal or menopausal condition, cancer, autoimmune disorder, hormonal dysfunction, cell proliferation disorder, or another health condition that inhibits or precludes the development of pregnancy competent oocytes.

[0059] For example, subjects who do not express specific pregnancy signature genes at characteristic expression levels will be screened to assess whether they have an underlying health condition that precludes them from producing pregnancy competent oocytes. Particularly, such subjects will be screened to assess whether they are exhibiting signs of menopause, whether they have a cancer, autoimmune disease or ovarian abnormality, e.g., ovarian cyst, or whether they have another health condition, e.g., hormonal disorder, allergic disorder, etc., that may preclude the development of “pregnancy competent” oocytes.

[0060] Additionally, the subject methods may be used to assess the efficacy of putative female fertility treatments in humans or non-human female subjects. Essentially, such methods will comprise treating a female subject, preferably a woman, with a putative fertility enhancing treatment, isolating at least one oocyte from said woman after treatment, optionally further isolating at least one oocyte prior to treatment, isolating at one cumulus cell from each of said isolated oocytes; detecting the levels of expression of at least one gene that is expressed or not expressed at characteristic levels by cumulus cells that are associated with (surround) pregnancy competent oocytes; and assessing the efficacy of said putative fertility treatment based on whether it results in cumulus cells that express at least one pregnancy signature gene at levels more characteristic of cumulus cells that surround pregnancy competent oocytes (than without treatment). As noted, while female human subjects are preferred, the subject methods may be used to assess the efficacy of putative fertility treatments in non-human female animals, e.g., female non-human primates or other suitable animal models for the evaluation of putative human fertility treatments.

[0061] Still further, the present invention may be used to enhance the efficacy of in vitro or in vivo fertility treatments. Particularly, oocytes that are found to be “pregnancy incompetent”, or are immature, may be cultured in one or more gene products that are encoded by “pregnancy signature” genes, e.g., hormones, growth factors, differentiation factors, and the like, prior to, during, or after in vivo, or in vitro fertilization. Essentially, these gene products should supplement for a deficiency in nutritional gene products that are ordinarily expressed by cumulus cells that surround “pregnancy competent” oocytes, and which normally nurture oocytes and thereby facilitate the capability of these oocytes to yield viable pregnancies upon fertilization.

[0062] Alternatively, one or more gene products encoded by said pregnancy signature genes may be administered to a subject who is discovered not to produce pregnancy competent oocytes according to the methods of the invention. Such administration may be parenteral, e.g., by intravenous, intramuscular, subcutaneous injection or by oral or transdermal administration. Alternatively, these gene products may be administered locally to a target site, e.g., a female ovarian or uterine environment. For example, a female subject may have her uterus or ovary implanted with a drug delivery device that provides for the sustained delivery of one or more gene products encoded by “pregnancy signature” genes.

[0063] Also, the novel CRL amplification protocol of the invention may be used to identify differentially expressed genes from any cell sample, preferably those only available in limited numbers such as e.g., samples used in forensic analysis, pathological samples such as cancer cells, especially cancer stem cells, cell samples suspected of containing an unknown pathogen, cell samples obtained from cells undergoing specific cellular processes such as differentiation, apoptosis, angiogenesis, and the like. This protocol has been found to faithfully and consistently amplify small amounts of RNA to quantities required for microarray analysis.

[0064] Thus, in general, the present invention involves the identification and characterization, in terms of gene identity and relative abundance, of genes that are expressed by desired cells, e.g., cumulus cells derived from an egg, preferably human egg, at the time of ovulation, preferably cumulus cells, the expression levels of which correlate to the capability of said egg to give rise to a viable pregnancy upon natural or artificial fertilization and transferal to a suitable uterine environment. Also, the invention identifies a set of genes differentially expressed by human or murine ESCs and metaphase II oocytes.

[0065] In one preferred embodiment, of the invention at least 50 to 100 genes that are significantly upregulated or downregulated, by cumulus cells that correlate to the “pregnancy competency”, of an oocyte from which said cumulus cells are associated with will be chosen and monitored in the inventive genetic testing methods.

[0066] However, while the invention preferably will select at least 50-100 genes from each of said categories, it is anticipated that the inventive methods alternatively may be practiced by monitoring the expression levels of fewer numbers of cumulus cell expressed genes, wherein said genes are similarly selected to be those which correlate to cumulus cells associated with “pregnancy competent” oocytes, i.e., those that are capable of yielding viable pregnancies.

[0067] According to the invention, gene expression levels will preferably be detected by the novel CRL amplification protocol provided herein. However other known methods, preferably real time detection methods such as mentioned above may be used to detect and quantify gene expression. Methods for detecting relative gene expression levels are known in the art and well within the purview of the ordinary skilled artisan.

[0068] As noted supra, this invention further provides a novel mRNA amplification protocol that is well suited for small cell samples such as a few or even a single cumulus cell or oocyte or ESC or other desired cell. This amplification protocol is well suited as well for forensic applications where only a minute nucleic acid sample may be available. Also, this technique is useful wherein only a few cells may be isolated from an individual such as adult stem cells, cancer stem cells, other differentiation specific cells, olfactory cells, taste cells, and the like. The present protocol will be useful in the biomedical field such as by medical and veterinary pathologists, e.g. in coordination with Laser-assisted Microdissection of tissues. Particularly, such applications may include cancer-related applications, research and disease diagnosis.

[0069] Previously, in order to generate a biotin-labeled antisense aRNA target for GeneChip experiments from limited amount of RNA samples, this entailed the use of commercial kits from several venders (such as Ambion TX, and Arcturus, CA) are available. All of these kits use the same approach based on the Eberwine T7 amplification method (See Eberwine Biotechniques 20:584-591 (1996)).

[0070] By contrast, the present invention provides an improvement thereover that faithfully and consistently amplifies small amounts of RNA to quantities required to perform microarray experiments. The CRL amplification protocol disclosed herein provides a practical approach to facilitate the analysis of gene expression in samples of small quantity while maintaining the relative gene expression profile throughout reactions (Kocabas et al., “Transcriptome Analysis of the Human Oocyte” In Press, 2006) which is incorporated by reference in its entirety herein.

[0071] The present amplification protocols achieve at least the following advantages:

[0072] (i) global mRNA amplification is possible for a limited number of cells, tissues and micro-dissected biopsy using other (non-CRL) PCR amplification method;

[0073] (ii) the protocol is comprised of simple laboratory manipulations;

[0074] (iii) the simplicity of the protocol contributes to a high level of reproducibility from experiment to experiment; and

[0075] (iv) the protocol time is shorter than other methods, in particular when multiple rounds are performed.

[0076] Based on these advantages this methodology is well suited for use in the present differential gene expression based-assays which detect genes the expression of which correlates to oocytes or embryonic stem cells as well as other applications wherein the detection of expressed genes in a sample is desired.

[0077] Essentially, the CRL protocol is depicted in FIG. 2 and comprises (i) first strand cDNA synthesis coupled with dC tailing by MMLV RT (Rnase H-); (ii) template switching and chain extension by RT; (iii) amplification of cDNA a requisite number of cycles, typically 5 to 50. more preferably around 10-20, more preferably around 15 cycles by LD-PCR using SMART primers; (iv) and production of double stranded DNAs by in vitro transcription using T7 RNA polymerase. As noted this methodology is applicable for amplification of mRNAs in any sample, but preferably is used in amplifying mRNAs from relatively small cell samples such as samples containing a few number of cumulus cells, oocytes, or stem cells.

[0078] In the inventive pregnancy signature gene detection methods, cumulus cells will be isolated from oocytes of different female subjects, the oocytes fertilized by known IVF procedures, and the cumulus cells of the corresponding isolated oocytes being subjected to gene expression analysis, i.e., by isolation of total RNA therefrom, amplification of said total RNA, quantification of the relative gene expression levels of said RNAs by microarray analysis and RT-PCR, and the identification of genes, the expression of which correlates to oocytes that give rise to a viable pregnancy.

[0079] To effect such identification, as a separate step, the status of embryos fertilized with oocytes derived from each of said cumulus cell samples will be monitored and pregnancy data recorded. Particularly, the relative birth rate and the health status of the newborn for each oocyte will be recorded and the gene expression levels of cumulus cells associated with each oocyte assessed as a function of pregnancy rate, newborn health, among other parameters, e.g., gender. Based on these results, a set of genes the expression of which correlates to pregnancy/health outcome or gender will be identified. (“pregnancy signature”)

[0080] This set of genes, and the corresponding expression levels is referred to herein as the “pregnancy signature” because these gene expression levels correlate to the development of a viable pregnancy and ultimately the production of a healthy newborn. While this “pregnancy signature” may comprise as many as 50, 100 or even 200 genes, it is anticipated that a fewer number of genes, e.g., on the order of 20 or less genes, may be sufficient to develop a suitable “pregnancy signature”.

[0081] The genes which constitute the “pregnancy signature” may include genes which encode gene products that are involved in the nutritional and developmental requirements of the oocyte, i.e., maturation and development, and the potential of the oocyte to be capable of yielding a viable pregnancy. These gene products may include growth factors, hormones, transcription factors, differentiation promoting agents, and the like. After the “pregnancy signature” is obtained, the corresponding genes are sequenced, the DNA sequences are then used to deduce the identify the corresponding polypeptide sequences, and these sequences then compared to databases of available human or other gene sequences to identify the identity of the gene products that correlate to the ability of an oocyte to yield a viable pregnancy. Genes which are differentially expressed by human oocytes are identified infra and include such pregnancy signature genes. Further statistical analysis of the relative levels of expression of these genes, or subsets of such genes, will identify preferred subsets of these genes that constitute a “pregnancy signature” of a viable oocyte, i.e., one that is pregnancy competent. The genes found to be differentially expressed in human cumulus cells are contained in SEQ ID NO's 1-513 infra.

[0082] As noted previously, these polypeptide gene products deficient in pregnancy incompetent oocytes may be added to in vitro culture media containing oocytes in order to enhance their pregnancy competency or alternatively may be administered in vivo as part of a fertility treatment regimen.

[0083] In order to further illustrate the advantages of the present invention, in particular those relating to the novel CRL amplification protocol the following example is provided. This exemplary is intended to be exemplary of the invention

### EXAMPLE 1

[0084] (Exemplification of CRL Amplification Protocol of the Invention with Oocyte and ES Cell Samples)

[0085] The mammalian oocyte is responsible for a number of extraordinary biological processes. It has the ability to haploidize its DNA, to reprogram sperm chromatin into a functional pronucleus, to drive early embryonic development and to give rise to pluripotent embryonic stem cells (ESCs). Identifying the genes in the oocyte essential for oogenesis, folliculogenesis, fertilization and early embryonic development will provide a valuable genomic resource in reproductive and developmental biology. However, the oocyte transcriptome and its functional significance in the human are relatively unknown due to ethical and technical limitations.

[0086] Attempts have been made to address this problem using candidate gene approaches employing reverse transcriptase-PCR (RT-PCR) and differential display 1-16. In addition, Serial Analysis of Gene Expression (SAGE) and complementary DNA (cDNA) libraries were generated from human oocytes, and SAGE tags and Expressed Sequence Tags (ESTs) were sequenced for rapid gene discovery and expression profiling in the oocytes (see reviews 17, 18). However these molecular approaches resulted in a small number of genes analyzed in each sample. DNA microarrays are relatively new technologies for whole-genome transcriptome analysis that when used in combination with reliable RNA amplification protocols, can be a powerful tool for the analysis of the oocyte transcriptome.

[0087] Extensive genomic studies of oocytes and preimplantation embryos have been conducted in mouse (19-24). However in human, the accessibility of mature oocytes i.e. metaphase II oocytes, is a major barrier to study oocyte genomics using microarrays. Recently, two reports described initial transcriptome analyses of human oocytes using microarrays with commercial RNA amplification kits (Arcturus, CA); a version of the Eberwine's T7 amplification method 25. The first study used discarded oocytes that failed to fertilize, and its array was limited to 8,793 transcripts 26. The second study employed mature human oocytes however its conclusions were based on only one reliable sample 27. Thus, the present study was conducted to identify the gene transcripts present in metaphase II oocytes within minutes after isolation from the ovary in three independent replicates and to compare these transcripts to a reference RNA (a mixture of total RNA from 10 different normal human tissues not including the ovary) using Affymetrix GeneChip technology. To achieve this goal, a novel protocol that combined template-switching PCR and T7 based amplification methods was developed for the analysis of gene expression in samples of small quantity. We amplified RNA from the oocyte and reference samples. Results were later compared with available transcriptome databases of mouse oocytes, and human and mouse ESCs.

[0088] Here, we report the transcript profile of in vivo matured human metaphase II oocytes using the most recent Affymetrix human GeneChip array interrogating over 47,000 transcripts including 38,500 well-characterized human genes.

[0089] Methods

[0090] Oocyte Collection, Total RNA Extraction and Reference RNA

[0091] Human oocytes were obtained from 3 patients undergoing an assisted reproductive treatment (ART) at the Unit of Reproductive Medicine of Clinica Las Condes, Santiago, Chile. The selection criteria for the donors was; a) less than 35 years old, b) reproductively healthy with regular ovulatory cycles, c) male factor as the only cause of infertility, and d) considerable number 0 developing follicles that assured spared oocytes. The experimental protocol was reviewed and approved by a local independent Ethics Review Board. All donors signed informed consent. At the time this manuscript was submitted, all three donors had already conceived; two of them got pregnant during the ART cycle in which our samples were collected, and the third one got pregnant following a spontaneous cycle with artificial insemination, using donated sperm. Ovarian stimulation and oocyte retrieval and isolation were performed as described in the supplemental information.

[0092] Three groups of 10 oocytes each were used. Total RNA was isolated following the guanidium thiocyanate method 28 using the PicoPure RNA isolation kit (Arcturus, CA) following manufacturer's instructions however only 6.5 •l elution buffer (Arcturus, CA) was used and the elution was repeated at least 3 times using the first eluate. All RNA samples within the purification column were treated with the RNase-Free DNase (Qiagen, CA). Extracted RNA was stored at −80° C. until used as template for cDNA synthesis. The quality and quantity of extracted total RNA from 8 matured oocytes (independent from the 30 oocytes used in this study) was evaluated on the Agilent 2100 bioanalyzer (Agilent Technologies, CA). Each mature oocyte was found to have about 330 pg total RNA when the Arcturus' RNA isolation kit was used. Quality of RNA was intact as shown in FIG. 3. Reference RNA (100 •g), was prepared by mixing 10 •g total RNA from each of 10 different normal human tissues including: skeletal muscle, kidney, lung, colon, liver, spleen, breast, brain, heart and stomach (Ambion, TX).

[0093] RNA Amplification for GeneChip Analysis (FIG. 3a)

[0094] First-strand cDNA synthesis: The following reagents were added to each 0.5 ml RNase-free tube: 5 •l total RNA (3 ng for the reference and 5 ®l, about 3 ng, for the oocyte samples) and 300 ng of an anchored T7-Oligo(dT)24 V promoter primer (Ambion, TX). The reaction tubes were incubated in preheated PCR machine at 70° C. for 2 min and transferred to ice. After denaturation, the following reagents were added to each reaction tube: 1.4 •l of SMART II A oligonucleotide (5′-AAGCAGTGGTATCAACGCAGAGTACGCGrGrGr-3′) (Clonetech, CA), 4 •l of 5× first-strand buffer, 2 •l of 20 mM DTT, 0.6 •l of 5 mg/ml T4 Gene 32 Protein (Roche, IN), 2•l of 10 mM dNTPs, 20 U RNase inhibitor (Ambion, TX) and 1 •l PowerScript Reverse Transcriptase (Clontech, CA). After gently mixing, reaction tubes were incubated at 42° C. for 60 min in a hot-lid thermal cycler. The reaction was terminated by heating at 70° C. for 15 min and purified by NucleoSpin Extraction Kit (Clonetech, CA).

[0095] Double-stranded cDNA synthesis by Long-distance (LD)-PCR, cDNA purification: PCR Advantage 2 mix (9 •l) was prepared as follows: 5 •l of 10×PCR Advantage buffer (Clontech, CA), 1 •l of 10 mM dNTPs, 100 ng 5′SMART upper primer (5′-AAGCAGTGGTATCAACGCAGAGTA-3′), 100 ng 3′SMART lower primer (5′-CGGTAATACGACTCACTATAGGGAGAA-3′), and 1 •l of Polymerase Mix Advantage 2 (Clontech, CA). This mix was added to 41 •l of the first-strand cDNA synthesis reaction product, and thermal cycling was carried out in the following conditions: 95° C. for 1 min, followed by 15 cycles, each consisting of denaturation at 94° C. for 30 sec, annealing at 62° C. for 30 see, and extension at 68° C. for 10 min. The cDNA was purified by NucleoSpin Extraction Kit following the manufacturer's instructions.

[0096] In vitro transcription (IVT), biotin labeled aRNA purification and aRNA fragmentation is described in supplemental information.

[0097] Microarray analysis: Transcriptional profile of each sample was probed using Affymetrix Human Genome U133 Plus 2.0 GeneChips. The raw data obtained after scanning the arrays was analyzed by dChip 29. A smoothing spline normalization method was applied prior to obtaining model-based gene expression indices, a.k.a. signal values. There were no outliers identified by dChip so all samples were carried on for subsequent analysis. More information on dChip is provided infra.

[0098] Pathways analysis was performed using Ingenuity Software Knowledge Base (Redwood City, Calif.), which is a manually created database of previously published findings on mammalian biology from the public literature. We used the network analysis using the knowledge base to identify interactions of input genes within the context of known biological pathways.

[0099] Gene Ontology (GO) was performed using EASE. Given a list of genes, EASE forms subgroups based on the functional categories assigned to each gene. EASE assigns a significance level (EASE score) to the functional category based on the probability of seeing the number of subgroup genes within a category given the frequency of genes from that category appearing on the microarray 30. (http://david.niaid.nih.gov/david/ease.htm)

[0100] Comparison with External Data Sets

[0101] Mouse MII oocyte transcriptome data was obtained from Su et al. who used custom designed Affymetrix chips to obtain gene expression profiles of oocytes and 60 other mouse tissue types 31. Using their expression database, we identified 3,617 differentially upregulated transcripts in the mouse oocyte by using the median expression value of the remaining 60 samples as the baseline (FIG. 7). We selected transcripts with an expression value in oocyte samples that are two-fold higher than the baseline.

[0102] Human embryonic stem cell (hESC) data was derived from the work of Sato et al. who profiled human stem cells and their differentiated counterparts using Affymetrix HG-U133A representing ˜22,000 transcripts (32).

[0103] We analyzed the raw data using dChip and identified 1,626 hESC genes by selecting transcripts significantly up-regulated in human stem cells compared to their differentiated counterparts (FIG. 8).

[0104] Finally for mouse ES cells we used a list of 1,687 differentially upregulated mouse ES genes published by Fortunel et al (33) which were identified by comparing mouse ES cells to differentiated cells using Affymetrix MG-U74Av2 chips representing 12,000 transcripts (Supplementary dataset 3). We used Affymetrix NetAffx tool (https://www.affymetrix.com/analysis/netaffxlindex.affx) for mapping genes across organisms and platforms used in the respective studies. Supplementary datasets 1, 2, 3, 4, 5, 6, 7 and 8 can be downloaded at www.reprogramming.net.

[0105] Results

[0106] Validation of Amplification Fidelity (Amplified vs. Non-Amplified RNA)

[0107] A critical step in the analysis of gene expression on small samples is the faithful amplification of mRNA molecules present in the sample. We have designed a PCR based amplification system using the combination of SMART II A oligonucleotide (Clonetech, CA) and T7-Oligo(dT) promoter primers (CRL amplification protocol) (FIG. 2a). We isolated total RNA from a human cell line and 20, 3 and 1.5 ng input total RNA was amplified using CRL amplification protocol. For each experiment, 15 μg of fragmented aRNA was hybridized to a single Affymetrix Human Genome U133 Plus 2.0 array. Non-amplified RNA from the same original sample (1 μg) was run in parallel by using the MessageAmp II aRNA Kit (Ambion, TX). Gene expression results from both amplified vs. nonamplified RNA samples were compared and the correlation coefficients were found to be 0.94 (FIG. 2b), 0.93, and 0.91 for 20 ng, 3 ng, and 1.5 ng of total input RNA, respectively. CRL Amplification protocol was repeated two times with 20 ng initial total RNA from the same cell type and the correlation between the two experiments was 0.99. These results show that our RNA amplification strategy faithfully and consistently amplifies small amounts of RNA to quantities required to perform microarray experiments. The CRL amplification protocol provides a practical approach to facilitate the analysis of gene expression in samples of small quantity while maintaining the relative gene expression profile throughout reactions.

[0108] Differentially Upregulated Genes in the Human Oocyte

[0109] We generated a database of the human oocyte transcriptome by comparing the transcripts in the oocyte and the reference samples which contain mRNA from several somatic tissues. A complete list of up and down regulated genes, functional, comparative and correlation analysis is provided (see FIG. 10). Compared to reference samples there were 5,331 transcripts significantly up-regulated and 7,074 transcripts significantly down-regulated in the oocyte. Genes up-regulated in oocyte samples included most of the well-known germ cell specific genes, such as FIGLA, STELLA, VASA, DAZL, GDF9, ZP1, ZP2, MOS, OCT 4, NPM2, and H1FOO. Our analysis also confirms the presence of pathways previously described in the mouse, in particular the TGF-• pathway (FIG. 11).

[0110] Validation of Microarray Data

[0111] A selected list of genes known to be expressed in the oocyte was used to validate the microarray results by RT-PCR (FIG. 4). These genes were found to be present in the oocyte sample and absent in the reference RNA.

[0112] Functional annotation of genes over-expressed in the Human Oocyte

[0113] To examine the biological processes performed by the oocyte, we implemented EASE36, contrasting the genes over-expressed in the oocyte with all the genes present in Affymetrix chip (FIG. 7). One of the top over-represented categories found in oocytes was related to RNA metabolism. This is in agreement with the fact that oocytes store RNA to support the events of fertilization and early embryonic development until the embryonic genome is activated (34, 35 36). DNA metabolism and chromatin modification were also over-represented categories, in agreement with the need of the oocyte to remodel the sperm chromatin upon fertilization.

[0114] Cell cycle related categories were the most over-represented. Many genes known to be involved in the regulation of the meiotic cell cycle were detected (MOS, AKT2, CDC25, and PLK1) (37). Detection of gametogenesis and reproduction as over-represented categories further suggests the accuracy of this transcriptional profiling. Protein kinases and phophatases denoted another functional category over-represented in oocytes. Many of the cell cycle regulatory genes (AURKB, CDC25, CDC7, PLK1, CCND2, CDC23 and PLK3) and some receptors of the TGF beta superfamily (ACVR1, ACVR2B, and BMPR1A and 1B) were in this category.

[0115] An important category that is highly represented in the oocyte was related to nucleic acid metabolism and regulation of transcription. Although transcriptionally silent at the MII stage, the oocyte is very active in transcription and translation during its growth phase and must be prepared to initiate transcription at the time of embryonic genome activation, 4 to 8-cell stage in human 38. Many of the genes in this category represent Zinc-finger proteins that are not yet fully characterized, providing an opportunity to discover new transcriptional regulatory networks that operate during embryonic genome activation.

[0116] We also found that chromatin remodeling genes are well represented in the human oocyte. Genes in this category expressed in the human oocyte were: DNA methyltransferases (DNMT1, DNMT3A and DNMT3B), histone acetyltransferases (NCOA 1 and, 3, SRCAP, GCN5L2 and TADA2L), histone deacetylases (HDAC3, HDAC9 and SIRT7), methyl-CpG-binding proteins (MBD2 and MBD4), histone methyltransferases (EHMT1 and SET8), ATPdependent remodeling complexes (SMARCA 1, SMARCA5, SMARCAD1, SMARCC2 and SMARCD1) and other chromatin modifying genes (ESR1, NCOA6, HMGB3, HMGN1 and HMGA 1).

[0117] These GO results validate our transcriptome analysis when compared with candidate gene analysis already reported in other species but more importantly, shed new light into a large number of biological processes that take place in the human oocyte.

[0118] Intersection Between Human Oocyte and Mouse Oocyte Transcriptome

[0119] Mouse has been the best model for genetic studies and several groups have already reported the transcriptome analysis of mouse oocytes 39. In an effort to find differences and similarities between the human and mouse oocyte, we compared our human oocyte transcriptome results with that of mouse oocyte transcriptome derived from data of Su et al (35). The intersection of the two transcriptomes yielded a set of 1,587 genes to be common in both mouse and human oocytes, indicating genes of conserved function in mammalian oocytes (FIG. 5a). (FIG. 8 further shows the functional characterization of 16 of the top 100 intersected genes which have their functions described in mouse oocytes. Many of these genes relate to oocyte maturation, from the first meiotic division to Mil arrest, encompassing various controls of cell cycle checkpoints and cellular machinery for DNA segregation and cell division. Using the Ingenuity software to analyze the intersection of these two datasets we found that the estrogen receptor (ER) signaling pathway is represented in human and mouse oocytes (FIG. 11). Genes significantly upregulated in this pathway were CTBP2, ESR1, GTF2H1, GTF2H2, MAP2K1, NCOA1, NCOA3, PCQAP, PHB2, POLR2C POLR2J, RBM9, TAF3, TAF4 and 4B, TAF5, TAF6, TAF12 and TBP. Recent studies in KO models for aromatase have shown that estrogen is not required for the generation of preimplantation embryos 40 however our study suggests that in the oocyte some genes associated with the ER pathways are transcribed, perhaps in response to hormonal stimulation during folliculogenesis and oocyte maturation. Like with the EGF pathway, it remains to be determined whether the ER pathway has a role during preimplantation development in human embryos.

[0120] Considering the high degree of similarity in early embryonic development between mouse and human, these 1,587 common genes deserve particular attention, and must be considered for future candidate gene-approach studies related to fertility disorders, developmental defects and assisted reproductive technologies. Furthermore, with the inherent ethical and technical difficulties of studying human oogenesis in the laboratory, the mouse model will continue to provide a platform for the functional characterization of other highly conserved genes which may bear significance in understanding human germ cell formation and maturation.

[0121] Intersection Between Transcriptomes of the Oocytes and Embryonic Stem Cells

[0122] The oocyte is derived from germ cell-precursors believed to have segregated from pluripotent precursors prior to somatic tissues differentiation (41). Primordial germ cells (PGCs) undergo mitotic proliferation followed by meiosis. By the time the oocyte reaches the MII stage, it is already a highly specialized cell capable of remodeling the sperm nucleus and restoring totipotency to the diploid zygote. In addition, somatic cell nuclear transfer (SCNT) into enucleated oocytes have shown that when challenged with a somatic nucleus, the oocyte cytosol will attempt to completely erase the somatic epigenetic phenotype and transform the nucleus to a totipotent state. Although failures in this epigenetic reprogramming have been reported elsewhere, there are reported cases in which animals produced by SCNT have developed normally (42). Reinforcing the notion that when SCNT is performed under ideal circumstances (yet to be described), the oocyte cytosol can turn a somatic nucleus into a totipotent one.

[0123] Recent somatic cell-ESCs fusion experiments suggest that ESCs retain similar as yet undefined components that can initiate the reprogramming of introduced somatic nucleus to confer totipotency to the somatic nuclei (as measured by phenotypic and by transcriptional analyses). In this respect, the cytoplasmic environment of both ESCs and oocytes share the capacity to reprogram somatic nucleus (43-45). Furthermore, recent work suggests that mESCs can give rise to PGCs that can differentiate into cells similar to oocytes and sperm in a period of time significantly shorter when compared to in vivo gametogenesis (46, 47)

[0124] In order to identify genes that may reflect the similarities between ESCs and oocytes, differentially upregulated transcripts in the oocyte were compared and intersected with recently published data for genes that are expressed preferentially in ESCS 32. Our analysis of the Sato et al data revealed 1,626 hESCs differentially upregulated genes (see methods). When these hESCs genes were intersected with our human differentially upregulated oocyte transcripts, we found an overlap of 388 transcripts (FIG. 6b). In the mouse, a comparison of differentially upregulated oocyte and mESCs transcripts (see methods). A list of 591 genes common to mouse oocyte and mESCs was obtained (FIG. 6c).

[0125] When compared with the human oocyte and hESC-shared transcripts, a list of 66 unique genes (78 transcripts) common amongst mouse oocyte, mESCs, human oocyte and hESCs was obtained. Five of these genes have unknown functions (FIG. 6d, FIG. 9). Among these 66 genes, there is a high abundance of chromatin and DNA modifying genes, suggesting that both the genome of the ESCs and oocytes are maintained in a responsive or primitive-native state, potentially primed for the activation of a whole repertoire of genes leading the generation of all tissue lineages. Whether any of these genes is involved in the ability to reprogram somatic nuclei would be interesting to explore.

### CONCLUSION

[0126] To our knowledge, this invention for the first time provides a comprehensive expression baseline of gene transcripts present in in vivo matured metaphase II human oocytes.

[0127] Using the most recent Affymetrix Human GeneChip we have identified 5,331 transcripts highly expressed in human oocytes, including well-know genes such as FIGLA, STELLA, VASA, DAZL, GDF9, ZP1, ZP2, MaS, OCT 4, NPM2, NALP5/MA TER, ZAR1 and H1 Faa. More importantly, 1,430 of these upregulated genes have unknown functions, arguing for the need for further studies aimed to elucidate the functional role of these genes in the human oocyte.

[0128] We have also identified a significant number of genes common between hESCs and MII oocytes. Such genes may provide the missing link between ESCs and MII oocytes and may serve as genetic resource to identify ESCs that have full potential for differentiation into an oocyte.

[0129] As in the case of many microarray studies, profiling of the genes in the tissues of interest is the first step of a comprehensive experimental approach towards dissecting biological processes and their players at the molecular level.

[0130] Further understanding of the biological role of these genes may expand our knowledge on meiotic cell cycle, fertilization, chromatin remodeling, gene regulation, lineage commitment, pluripotency, tissue regeneration, and morphogenesis. The practical implications of compiling gene expression information on human gametes and embryos would be enormous by bolstering efforts to solve problems from infertility to degenerative diseases.

[0131] Supplemental Information

[0132] Methods:

[0133] Ovarian stimulation was performed under a long protocol, Gn-RH analog suppression (Ieuprolide acetate, Lupron®-Abbott) in a daily subcutaneous (s/c) dose of 0.5 mg. Recombinant FSH (rFSH, Gonal-f®-Serono or Puregón®-Organon) was administrated in daily doses that ranged between 200-300 IU, starting the second day of the mense. Follicular growth and estradiol levels were monitored every two to three days until follicles had a mean diameter between 18 and 20 mm. Oocyte maturation was achieved by an injection of 10,000 IU of hCG (pregnyl® Organon). Oocytes were retrieved from the ovary by aspiration using guided transvaginal ultrasound thirty six hours after hCG administration. Three hours after retrieval, oocytes were denuded from surrounding corona and cumulus cells by a brief incubation (10-30 sec) in 80 IU/ml hyaluronidase solution (LifeGlobal, USA) and subsequent pipetting to completely eliminate other cells. Oocytes were then observed at high magnification to confirm maturity (metaphase II stage) and to confirm the absence of other cells. Each oocyte was rinsed in sterile PBS and lysed in 100 •l of extraction buffer (XB, Arcturus, CA) in a RNase/DNase/Pyrogen free 0.5 ml microcentrifuge tube. Each sample was incubated for 30 min at 42° C., centrifuged at 3,000 g for 2 min and stored in liquid nitrogen until use.

[0134] In vitro transcription (IVT), biotin labeled aRNA purification and aRNA fragmentation: The purified double-stranded cDNA containing the T7 promoter sequence was used as a template for IVT labeling assays in the presence of biotin labeled-ribonucleotides, using the BioArray HighYield RNA Transcript Labeling kit with T7 RNA polymerase (ENZO, NY) as described by the manufacturer. The biotin-labeled aRNA was purified using RNeasy mini columns (RNeasy Mini Kit, QIAGEN, CA). In vitro transcription of the cDNA for each replicate yielded 70-90 μg of biotinylated aRNA and 15 μg of the labeled aRNA was fragmented at 94° C. for 35 min in 1× fragmentation buffer (40 mM Trisacetate pH 8.1, 100 mM KOAc and 30 mM MgOAc).

[0135] Hybridization Washing, Staining and Imaging: The Affymetrix GeneChip system was used for hybridization, staining and imaging of the arrays. Hybridization cocktails of 300 μI containing 15 μg of fragmented biotin-labeled aRNA and biotinylated exogenous hybridization controls (50 pM control Oligo B2, Eukaryotic hybridization controls (BioB at 1.5 pM, BioC at 5 pM, BioD at 25 pM and CreX at 100 pM), herring sperm DNA (0.1 mg/ml), BSA (0.5 mg/ml) in buffer (100 mM MES, 1 M NaCI, 20 mM EDTA and 0.01% Tween-20) were hybridized to the GeneChip Human Genome U133 plus 2.0 array (Affymetrix, CA). Hybridizations were performed automatically and each array was pre-hybridized with all components except the fragmented biotin-labeled aRNA in a chamber at 45° C. for 15 min. with rotation at 60 rpm. The pre-hybridized array was then hybridized with the aRNA cocktail for 16 hrs under the pre-hybridization conditions. After hybridization, the cocktail was removed from chip and the array was filled with non-stringent wash buffer (6×SSPE and 0.01% Tween-20). The arrays were washed according to Affymetrix protocol on a Fluidics station using non-stringent and stringent (100 mM MES, 0.1 M NaCl and 0.01% Tween-20) wash buffers. For the detection of hybridized fragments, the array was stained using SAPE (streptavidin-linked to phycoerythrin) stain and antibody solutions. SAPE stain solution (600 μl) contained 2 mg/ml BSA, 10 μg/ml streptavidin Phycoerythrin (SAPE) in 100 mM MES, 1M NaCI and 0.05% Tween-20. The antibody solution (600 μl) also contained: 2 mg/ml BSA, 0.1 mg/ml goat IgG, μg/ml biotinylated anti-streptavidin antibodies in 100 mM MES, 1 M NaCI and 0.05% Tween-20. The order of staining is SAPE, antibody and second SAPE.

[0136] The arrays were scanned using Affymetrix's high density GeneArray Scanner 3000 and imaged using Affymetrix GeneChip Operating Software (GCOS). The GCOS expression data report was generated for each sample and used to judge the quality of sample preparation and hybridization. The report included information about noise, background and percentage of probe sets called present based on the manufacturer threshold and software settings. Information about performance of exogenously, added prokaryotic hybridization control genes such as BioB, BioC and BioD of the E. coli biotin synthesis pathway and the ratio of intensities of 3′ probes to 5′ probes for housekeeping genes such as GAPDH and •-actin were also included in the report.

[0137] dChip Analysis

[0138] When comparing two groups of samples to identify genes enriched in a given group, we used the lower confidence bound (LCB) of the fold change (FC) between the two groups as the cut-off criteria. If 90% LCB of FC between the two groups was above 2, the corresponding gene was considered to be differentially expressed (DE). LCB is a stringent estimate of the FC and has been shown to be the better ranking statistic 48. Recently, dChip's LCB method for assessing DE genes have been shown to be superior to other commonly used approaches, such as MAS 5.0 and Robust Multiarray Average (RMA) (49) based methods (50).

[0139] By using LCB, we can be 90% confident that the actual FC is some value above the reported LCB. It was suggested by a study exploring the accuracy and calibration of Affymetrix chips using custom arrays and quantitative reverse transcriptase real-time PCR assays that the chip analyses underestimate differences in gene expression (51). It is then assumed that those genes with an LCB above 2 most likely have an actual FC of at least 3 52.

[0140] RT-PCR: Equal amounts of the remaining LD-PCR reactions diluted 1:1 with sterile H20 were amplified by gene-specific primers (FIG. 5). After an initial incubation at 94° C. for 3 min, the RT-PCR was carried out at 94° C. for 45 sec, 60° C. for 30 sec, 72° C. for 40 sec for 30 cycles. Upon the completion of PCR, the reaction was incubated at 72° C. for an additional 10 min. RT-PCR products were electrophoresed on a 1.5% agarose gel and documented with a Gel Documentation System (Bio-Rad, CA).

### REFERENCES

[0141] The following additional references are cited supra in the examples and are incorporated by reference in their entirety herein.
[0142] 1. Pitera J E. Milla P J, Scambler P. Adjaye J. Cloning of HOXDI from unfertilised human oocytes and expression analyses during murine oogenesis and embryogenesis. Mech Dev 2001; 109:377-81.
[0143] 2. Verlinsky Y. Morozov G. Gindilis V, et al. Homeobox gene expression in human oocytes and preembryos. Mol Reprod Dev 1995; 41:127-32.
[0144] 3. Adjaye J. Daniels R, Monk M. The construction of cDNA libraries from human single preimplantation embryos and their use in the study of gene expression during development. J Assist Reprod Genet 1998; 15:344-8.
[0145] 4. Adjaye J. Bolton V, Monk M. Developmental expression of specific genes detected in high-quality cDNA libraries from single human preimplantation embryos. Gene 1999; 237:373-83.
[0146] 5. Adjaye J. Monk M. Transcription of horn eo box-containing genes detected in cDNA libraries derived from human unfertilized oocytes and preimplantation embryos. Mol Hum Reprod 2000; 6:707-11.
[0147] 6. Daniels R. Lowell S, Bolton V, Monk M. Transcription of tissue-specific genes in human preimplantation embryos. Hum Reprod 1997; 12:2251-6
[0148] 7. Daniels R. Adjaye J, Bolton V, Monk M. Detection of a novel splice variant of the hypoxanthine-guanine phosphoribosyl transferase gene in human oocytes and preimplantation embryos: implications for a RT-PCR-based preimplantation diagnosis of Lesch-Nyhan syndrome. Mol Hum Reprod 1998; 4:785-9.
[0149] 8. Hinkins M. Huntriss J, Miller D, Picton H M Expression of Poly comb-group genes in human ovarian follicles, oocytes and preimplantation embryos. Reproduction 2005; 130:883-8.
[0150] 9. Liu H C. He Z Y, Tang Y X, et al. Simultaneous detection of multiple gene expression in mouse and human individual preimplantation embryos. Fertil Steril 1997; 67:733-41.
[0151] 10. Salpekar A. Huntriss J, Bolton V, Monk M. The use of amplified cDNA to investigate the expression of seven imprinted genes in human oocytes and preimplantation embryos. Mol Hum Reprod 2001; 7:839-44.
[0152] 11. Goto T. Adjaye J, Rodeck Cll, Monk M. Identification of genes expressed in human primordial germ cells at the time of entry of the female germ line into meiosis. Mol Hum Reprod 1999; 5:851-60.
[0153] 12. Hsieh R H, Au H K, Yeh T S, Chang S J, Cheng Y F, Tzeng C R. Decreased expression of mitochondrial genes in human unfertilized oocytes and arrested embryos. Fertil Steril 2004; 81 Suppl 1:912-8.
[0154] 13. Huntriss J. Hinkins M, Oliver B, et al. Expression of mRNAs for DNA methyltransferases and methyl-CpG-binding proteins in the human female germ line, preimplantation embryos, and embryonic stem cells. Mol Reprod Dev 2004; 67:323-36.
[0155] 14. Huntriss J. Gosden R, Hinkins M, et al. Isolation, characterization and expression of the human Factor In the Germline alpha (FIGLA) gene in ovarian follicles and oocytes. Mol Hum Reprod 2002; 8: 1087-95.
[0156] 15. Monk M. Holding C, Goto T. Isolation of novel developmental genes from human germ cell, oocyte and embryo cDNA by differential display. Reprod Fertil Dev 2001; 13:51-7.
[0157] 16. Goto T. Jones G M, Lolatgis N, Pera M F, Trounson A O, Monk M. Identification and characterisation of known and novel transcripts expressed during the final stages of human oocyte maturation. Mol Reprod Dev 2002; 62:13-28.
[0158] 17. Ko M S. Embryogenomics: developmental biology meets genomics. Trends Biotechnol 2001; 19:511-8.
[0159] 18. Adjaye 1. Whole-genome approaches for large-scale gene identification and expression analysis in mammalian preimplantation embryos. Reprod Fertil Dev 2005; 17:37-45.
[0160] 19. Brambrink T. Wabnitz P, Halter R et al. Application of cDNA arrays to monitor mRNA profiles in single preimplantation mouse embryos. Biotechniques 2002; 33:376-8, 380, 382-5.
[0161] 20. Tanaka T S, Ko M S. A global view of gene expression in the preimplantation mouse embryo: morula versus blastocyst. Eur J Obstet Gynecol Reprod Biol 2004; 115 Suppl 1: S85-9l.
[0162] 21. Wang Q T. Piotrowska K. Ciemerych M A, et al. A genome-wide study of gene activity reveals developmental signaling pathways in the preimplantation mouse embryo. Dev Cell 2004; 6:133-44.
[0163] 22. Zeng F. Baldwin D A, Schultz R M. Transcript profiling during preimplantation mouse development. Dev Biol 2004; 272:483-96.
[0164] 23. Pan H, O'Brien M J, Wigglesworth K, Eppig J J, Schultz R M. Transcript profiling during mouse oocyte development and the effect of gonadotropin priming and development in vitro. Dev Biol 2005; 286:493-506.
[0165] 24. Hamatani T, Carter M G, Sharov A A, Ko M S. Dynamics of global gene expression changes during mouse preimplantation development Dev Cell 2004; 6: 117-31.
[0166] 25. Eberwine J Amplification of mRNA populations using aRNA generated from immobilized oligo(dT)-T7 primed cDNA. Biotechniques 1996; 20:584-91.
[0167] 26. Bermudez M G, Wells D, Malter H, Munne S, Cohen J, Steuerwald N M. Expression profiles of individual human oocytes using microarray technology Reprod Biomed Online 2004; 8:325-37.
[0168] 27. Dobson A T, Raja R, Abeyta M J, et al. The unique transcriptome through day 3 of human preimplantation development. Hum Mol Genet 2004; 13:1461-70.
[0169] 28. Chomczynski P, Sacchi N. Single-step method of RNA isolation by acid guanidinium thiocyanate-phenol-chloroform extraction. Anal Biochem 1987; 162:156-9.
[0170] 29. Li C, Wong W H. Model-based analysis of oligonucleotide arrays: expression index computation and outlier detection. Proc Natl Acad Sci, USA 2001:98:316.
[0171] 30. Hosack D A, Dennis G, Jr., Sherman B T, Lane H C, Lempicki R A. Identifying biological themes within lists of genes with EASE. Genome Biol 2003; 4:R70.
[0172] 31. Su A I, Wiltshire T, Batalov S, et al. A gene atlas of the mouse and human protein encoding transcriptomes. Proc Natl Acad Sci, USA 2004; 101:6062-7.
[0173] 32. Sato N, Sanjuan 1M, Heke M, Uchida M, Naef F, Brivanlou A H. Molecular signature of human embryonic stem cells and its comparison with the mouse. Developmental Biology 2003; 260:404-413.
[0174] 33. Fortunel N O, Otu H H, Ng H H, et al. Comment on “‘Sternness’: transcriptional profiling of embryonic and adult stem cells” and “a stem cell molecular signature”. Science 2003; 302:393; author reply 393.
[0175] 34. Bachvarova R. Gene expression during oogenesis and oocyte development in mammals. Dev Bioi (NY 1985) 1985; 1:453-524.
[0176] 35. Wassarman P M, Kinloch R A Gene expression during oogenesis in mice. Mutat Res 1992; 296:3-15.
[0177] 36. De La Fuente R, Eppig J J Transcriptional activity of the mouse oocyte genome: companion granulosa cells modulate transcription and chromatin remodeling. Dev Biol 2001; 229:224-36.
[0178] 37. Kishimoto T. Cell-cycle control during meiotic maturation. Curr Opin Cell Biol 2003; 15:654-63.
[0179] 38. Braude P, Bolton V, Moore S. Human gene expression first occurs between the four- and eight-cell stages of preimplantation development Nature 1988; 332:459-61.
[0180] 39. Hamatani T, Carter M G, Sharov A A, Ko M S H. Dynamics of Global Gene Expression Changes during Mouse Preimplantation Development Developmental Cell 2004; 6:117-131.
[0181] 40. Huynh K, Jones G, Thomas G, Britt K L, Simpson E R, Jones M E. Estrogen is not directly required for oocyte developmental competence. Bioi Reprod 2004; 70:1263-9.
[0182] 41. Cauffman G, Van de Velde H, Liebaers I, Van Steirteghem A DAZL expression in human oocytes, preimplantation embryos and embryonic stem cells. Mol Hum Reprod 2005; 11:405-11.
[0183] 42. Lanza R P, Cibelli J B, Faber D, et al. Cloned cattle can be healthy and normal. Science 2001; 294:1893-4.
[0184] 43. Byrne J A, Simonsson S, Western P S, Gurdon J B. Nuclei of adult mammalian somatic cells are directly reprogrammed to oct-4 stem cell gene expression by amphibian oocytes. Curr Biol 2003; 13:1206-1213.
[0185] 44. Cowan C A, Atienza J, Melton D A, Eggan K. Nuclear reprogramming of somatic cells after fusion with human embryonic stem cells. Science 2005; 309:1369-73.
[0186] 45. Tada M, Takahama Y, Abe K, Nakatsuji N, Tada T. Nuclear reprogramming of somatic cells by in vitro hybridization with ES cells. Curr Bioi 2001; 11:1553-8.
[0187] 46. Hubner K, Fuhrmann G, Christenson L K, et al. Derivation of Oocytes from Mouse Embryonic Stem Cells. Science 2003:1083452.
[0188] 47. Geijsen N, Horoschak M, Kim K, Gribnau J, Eggan K, Daley G Q. Derivation of embryonic germ cells and male ganletes from embryonic stem cells. Nature 2003/2004; AOP: 1-6.
[0189] 48 Li C, Hung Wong W. Model-based analysis of oligonucleotide arrays: model validation, design issues and standard error application. Genome Biol 2001; 2: RESEARCH0032.
[0190] 49. Irizarry R A, Bolstad B M, Collin F, Cope L M, Hobbs. B, Speed T P. Summaries of Affymetrix GeneChip probe level data. Nucleic Acids Res 2003; 31:e15.
[0191] 50. Shedden K, Chen W, Kuick R, et al. Comparison of seven methods for producing Affymetrix expression scores based on False Discovery Rates in disease profiling data. BMC Bioinformatics 2005; 6:26.
[0192] 51. Yuen T, Wurmbach E, Pfeffer R L, Ebersole B J, Sealfon Sc. Accuracy and calibration of commercial oligonucleotide and custom cDNA microarrays. Nucleic Acids Res 2002; 30:e48.
[0193] 52. Ramalho-Santos M, Yoon S, Matsuzaki Y, Mulligan R C, Melton D A. “Sternness”: transcriptional profiling of embryonic and adult stem cells. Science 2002; 298:597-600.

[0194] The following Figures are cited in the example above.

[0195] FIG. 3. Digital RNA gel-like image. MII Oocyte; size distribution of the total RNA sample isolated from 8 matured human oocytes run 3 times. The 28S and 18S ribosomal RNA bands are clearly visible in the intact RNA samples from the mature oocytes. L indicates RNA 6000 ladder.

[0196] FIG. 2.a—Flow Chart of CRL amplification protocol; 2b. Representative plot of gene intensities comparing CRL and Ambion amplification methods.

[0197] FIG. 4. RT-PCR verification of the GeneChip array result. Loading orders of the gel were as following: M, 100 bp molecular weight standards with sizes as indicated on the left margin; OCT 4, POU domain, class 5, transcription factor 1; STELLA, DPPA3, developmental pluripotency associated 3; ESG1, embryonal stem cell specific gene 1; VASA, DEAD box RNA helicase; GDF9, growth differentiation factor 9; ZP1, zona pellucida glycoprotein 1; H1 FOO, H1 histone family, member 0, oocyte-specific; CDH3, cadherin 3, type 1, P-cadherin (placental); TUB4Q, beta-tubulin; ACTB, beta actin; and negative control with no DNA template.

[0198] FIG. 5: Selected overrepresented GO biological processes in oocytes identified by EASE (EASE score <0.05).

[0199] FIG. 6. Venn diagrams depicting; a—intersection between DE genes in the human (HU OG) and mouse oocyte (MO OG). 1,587 transcripts Were found to be in common in both species; b—intersection between DE genes in HU OC and hESCs, 388 transcripts were found to be common in both cell-types; c—intersection between DE genes in MO OC and mESCs, 591 transcripts were found to be common in both cell-types; d—intersection between DE genes in HU OC/hESC and MO OC/mESC, 78 transcripts were found to be common in all 4 cell-types.

[0200] FIG. 7 Information of the primers and their sequences used for the validation of the microarray experiment by RT-peR.

[0201] FIG. 8: Selected representations of genes common between human oocyte and mouse oocyte with homologues functionally characterized in the mouse oocyte (16 selected genes out of the top 100).

[0202] FIG. 9. List of 66 unique genes in common among human oocytes, mouse oocytes, hESCs and mESCs.

[0203] FIG. 10. TGF-beta Signaling Pathway. Genes shown in red are differentially upregulated in the human oocytes.

[0204] FIG. 11. Estrogen Receptor Signaling Pathway. Genes shown in red are differentially upregulated in the human and mouse oocytes.

### EXAMPLE 2

[0205] Description

[0206] Phase I: At the clinic, embryologists will remove the cumulus cells of two eggs and fertilize them. Embryos will be transferred to the uterus of a woman and cumulus cells sent to the laboratory for analysis. Once the cells arrive to the laboratory, RNA will be isolated and microarray analysis performed using Affymetrix platform. Pregnancy tests will be done by ultrasound on day 30 and embryonic sacs counted. There will be three kinds of outcomes: 1) 0 sacs; 2) 1 sac and 3) 2 sacs. A minimum of 30 volunteer women will participate during this phase. Ten with no sacs, ten with one sac and ten with 2 sacs. Pregnancy data will be correlated with gene expression obtained from the cumulus cells isolated from those same eggs. One hundred genes that directly correlate with pregnancy—either by upregulation or downregulation—will be further analyzed using real time RT-PCR. The best 20 genes that correlate with pregnancy (positively or negatively) will be called “pregnancy signature” and used for later testing at the clinic.

[0207] Phase II: Blind validation of genes in the pregnancy signature. At the clinic, the embryologist will isolate RNA from cumulus cells from each oocyte that will be later fertilized. Half of the RNA will be sent to our laboratory and the rest will be used for real time RT-PCR analysis to be performed on site. Gene expression of the “pregnancy signature” will be measured. Embryologists will transfer embryos without knowing the outcome of gene expression analysis. One hundred women will be asked to participate as volunteers in this part of the study. At the time pregnancy results are obtained, the study will be unmasked and results from each individual will be correlated with gene expression analysis. We anticipate that the “pregnancy signature” put forward in phase 1 will be validated during this phase.

[0208] Alternative strategy: In the event of an unexpected outcome i.e., the pregnancy signature is not validated; microarray analysis will be run once more using the RNA provided by the clinic in phase 2. It is anticipated that having 100 more samples will result in the identification of a clear pattern of gene expression in cumulus cells from eggs capable (or non-capable) of generating a healthy pregnancy/baby.

[0209] Using microarray analysis as described above, the genes identified infra were found to be differentially expressed by cumulus cells obtained from eggs of women donors. The expression of those particular genes which correlate to pregnancy (positive or negative) will establish a “pregnancy signature”, i.e., genes the expression or absence of expression of which correlates to a positive pregnancy outcome and “infertility signature”, i.e., specific genes the expression or absence of expression correlate to fertility problems or abnormalities.

[0210] This is effected preferably by microarray analysis. For example, comparison of expression between two samples on filter arrays may be performed by comparing nucleic acids obtained from normal oocyte cells to those obtained from a donor suspected of having ovarian dysfunction that renders oocytes pregnancy incompetent on two duplicate filters or alternatively a single filter may be used that is stripped and hybridized sequentially.

[0211] Direct comparison of gene expression in two samples can be achieved on glass arrays by labeling the two samples with different flourophores. This technique allows the evolution of repression of gene expression as well as induction of expression. The two flouresently-labeled cDNAs are then mixed and hybridized on a single glass or filter array. Glass arrays have the advantage of allowing the simultaneous analysis of two samples on the same array under the same hybridization conditions.

[0212] Gene arrays containing sequences of genes implicated in pregnancy (“pregnancy signature”) will allow high-throughput screening of individuals for diagnostic purposes or tailor-made treatments.

[0213] Arrays of polynucleotide, the expression of which corresponds to, or are complementary to the sequences of genes identified by the method of the invention therefore provide a further aspect of the invention. Such an array will include at least two nucleic acid sequences, preferably at least 10, and more preferably at least 20, e.g., 50 genes or more that correspond to the sequence of, or are complementary to genes, the expression of which (positive or negative) the positive pregnancy outcome in cells obtained from oocyte donors, e.g., women suspected to have ovarian dysfunction as a result of disease, age, and the like. Protein arrays form a further aspect of the invention and will contain polypeptides encoded by such pregnancy signature genes or antibodies which bind thereto.

[0214] Recent developments in the field of protein and antibody arrays allow the simultaneous detection of a large number of proteins. As noted previously using these methods the following genes were found to be differentially expressed in the cumulus cell samples assayed as described above. The expression of these cumulus cell genes or a subset thereof will be used to identify the “pregnancy signature” i.e., the genes the level of expression of which correlates to the ability of an oocyte from a host from which the cumulus cells are derived to initiate and sustain a viable pregnancy. Set forth below are 513 genes which were found to be differentially expressed in the huma cumulus cells assayed as described above. These genes or a subset thereof, e.g., on the order of 25-50 genes, more preferably 5-15 genes, may be used to identify a putative pregnancy signature, i.e., the genes for which differential expression correlates to the ability of oocytes associated therewith to be capable of giving rise to a normal pregnancy, (pregnancy competent).

LENGTHY TABLE REFERENCED HERE
US20070054289A1-20070308-T00001
Please refer to the end of the specification for access instructions.

LENGTHY TABLE
The patent application contains a lengthy table section. A copy of the table is available in electronic form from the USPTO web site (http://seqdata.uspto.gov/?pageRequest=docDetail&DocID=US20070054289A1). An electronic copy of the table will also be available from the USPTO upon request and payment of the fee set forth in 37 CFR 1.19(b)(3).

The application's sequence listing, which the Patent Office published only in electronic form, follows.

SEQUENCE LISTING (540 sequences)

SEQ ID NO: 1 - DNA, 870 bp, Homo sapiens
  modified_base (9)..(9): a, c, g, t, unknown, or other
  modified_base (99)..(99): a, c, g, t, unknown, or other
  modified_base (103)..(103): a, c, g, t, unknown, or other
  modified_base (106)..(107): a, c, g, t, unknown, or other
  modified_base (109)..(109): a, c, g, t, unknown, or other
  modified_base (112)..(114): a, c, g, t, unknown, or other
  modified_base (116)..(117): a, c, g, t, unknown, or other
  modified_base (119)..(119): a, c, g, t, unknown, or other
  modified_base (121)..(130): a, c, g, t, unknown, or other
  modified_base (840)..(870): a, c, g, t, unknown, or other
gcttttgtntccggtgagttttgtggcgggaagcttctgcgctggtgcttagtaaccgactttcctccggactcctgcacgacctgctcctacagccgngcgntcnncnccnnngnngntnnnnnnnnnnggtccagaggcctttcagaaggagaaggcagctctgtttctctgcagaggagtagggtcctttcagccatgaagcatgtgttgaacctctacctgttaggtgtggtactgaccctactctccatcttcgttagagtgatggagtccctagagggcttactagagagcccatcgcctgggacctcctggaccaccagaagccaactagccaacacagagcccaccaagggccttccagaccatccatccagaagcatgtgataagacctccttccatactggccatattttggaacactgacctagacatgtccagatgggagtcccattcctagcagacaagctgagcaccgttgtaaccagagaactattactaggccttgaagaacctgtctaactggatgctcattgcctgggcaaggcctgtttaggccggttgcggtggctcatgcctgtaatcctagcactttgggaggctgaggtgggtggatcacctgaggtcaggagttcgagaccagcctcgccaacatggcgaaaccccatctctactaaaaatacaaaagttagctgggtgtggtggcagaggcctgtaatcccagctccttgggaggctgaggcgggagaattgcttgaacccggggacggaggttgcagtgagccgagatcgcactgctgtacccagcctgggccacagtgcaagactccatctcnnnnnnnnnnnnnnnnnnnnnnnnnnnnnnn

SEQ ID NO: 2 - DNA, 1107 bp, Homo sapiens
  modified_base (641)..(641): a, c, g, t, unknown, or other
tccaaaaaaataaagctctcagggagacatgaataaaatcaatgaacattagaaaataaaatatagatgcttaccattaacctaccaactcttaatatccttaaattatgtgatatataaagaggactgttacttttttactttttttttttttttttttttggctttgctttatttatttgtagttgggggctaacgttttctcttttctttctattgatcctgttgtggttgggtttcctgtggagagagtagtttgtcctgttgcactagaacattatttactcactaaattgagtttttcagtcaattaacaaatatttattaagttcctactatgtaccaggcatagtagggctacaatggtaagcaagacagagtccctgcccccaaagagcttatattctaatggggatattaagggatgaatagaataccaatgtgtgcactgtacaggaatcatactatttaaaaataatttgtataaactataatgcttagcacagatggcgagttatctgtgctatgtgaaagctgtgaaatagtgctctaagagttgtcaagagctgtggttttacatcttttcctcattgcaaatttagtgactttctacacactatatggaaataaatgactagcanataaaacagtcataaatacaaagcagaggttgcactcccccaatcccgagttaacccaggtctgcaataacaccatgttaaaggtgcagatagagacttggctcaaaaaggcttggagatgaggaagattggaatataatgatggttttgtctgttccttaactaaagtgcctctatgtatattcttttctatttgtagcaggataaatttggtctggctcagttttggaactgtattttgaaaatggctttgtcttacagtttaaggaatagacaggtggagggaaagtcacataaaggagcaagtttgtgtagctgtccctcttgccccttttaatcatcctcctttgatatggccatcctggtgggcctcctttgccatttccatttttggtttctttccctgaaaactgtgtgcaggtaattccatgtgccattgttgaaaagaaaaaaaaaaaaagaaaaa

SEQ ID NO: 3 - DNA, 5468 bp, Homo sapiens
  modified_base (8)..(8): a, c, g, t, unknown, or other
  modified_base (717)..(717): a, c, g, t, unknown, or other
  modified_base (719)..(720): a, c, g, t, unknown, or other
  modified_base (771)..(771): a, c, g, t, unknown, or other
  modified_base (784)..(784): a, c, g, t, unknown, or other
  modified_base (823)..(823): a, c, g, t, unknown, or other
  modified_base (834)..(834): a, c, g, t, unknown, or other
  modified_base (836)..(836): a, c, g, t, unknown, or other
  modified_base (847)..(847): a, c, g, t, unknown, or other
  modified_base (860)..(860): a, c, g, t, unknown, or other
  modified_base (873)..(873): a, c, g, t, unknown, or other
  modified_base (875)..(875): a, c, g, t, unknown, or other
  modified_base (886)..(886): a, c, g, t, unknown, or other
  modified_base (888)..(888): a, c, g, t, unknown, or other
  modified_base (899)..(899): a, c, g, t, unknown, or other
  modified_base (927)..(927): a, c, g, t, unknown, or other
  modified_base (934)..(934): a, c, g, t, unknown, or other
  modified_base (965)..(965): a, c, g, t, unknown, or other
  modified_base (967)..(967): a, c, g, t, unknown, or other
  modified_base (978)..(978): a, c, g, t, unknown, or other
  modified_base (980)..(980): a, c, g, t, unknown, or other
  modified_base (1147)..(1147): a, c, g, t, unknown, or other
  modified_base (1149)..(1149): a, c, g, t, unknown, or other
  modified_base (1160)..(1160): a, c, g, t, unknown, or other
  modified_base (1173)..(1173): a, c, g, t, unknown, or other
  modified_base (1175)..(1175): a, c, g, t, unknown, or other
  modified_base (1186)..(1186): a, c, g, t, unknown, or other
  modified_base (1513)..(1513): a, c, g, t, unknown, or other
  modified_base (1649)..(1649): a, c, g, t, unknown, or other
  modified_base (1651)..(1653): a, c, g, t, unknown, or other
  modified_base (2170)..(2170): a, c, g, t, unknown, or other
  modified_base (2258)..(2258): a, c, g, t, unknown, or other
  modified_base (2260)..(2260): a, c, g, t, unknown, or other
  modified_base (2658)..(2659): a, c, g, t, unknown, or other
  modified_base (2661)..(2662): a, c, g, t, unknown, or other
  modified_base (2664)..(2669): a, c, g, t, unknown, or other
  modified_base (2671)..(2676): a, c, g, t, unknown, or other
  modified_base (2679)..(2680): a, c, g, t, unknown, or other
  modified_base (2683)..(2689): a, c, g, t, unknown, or other
  modified_base (2696)..(2698): a, c, g, t, unknown, or other
  modified_base (2700)..(2702): a, c, g, t, unknown, or other
  modified_base (2704)..(2704): a, c, g, t, unknown, or other
  modified_base (2706)..(2706): a, c, g, t, unknown, or other
  modified_base (3128)..(3128): a, c, g, t, unknown, or other
  modified_base (3909)..(3911): a, c, g, t, unknown, or other
  modified_base (3922)..(3922): a, c, g, t, unknown, or other
  modified_base (3932)..(3932): a, c, g, t, unknown, or other
  modified_base (3944)..(3944): a, c, g, t, unknown, or other
  modified_base (4046)..(4046): a, c, g, t, unknown, or other
  modified_base (4058)..(4058): a, c, g, t, unknown, or other
  modified_base (4112)..(4112): a, c, g, t, unknown, or other
  modified_base (4690)..(4691): a, c, g, t, unknown, or other
  modified_base (5386)..(5387): a, c, g, t, unknown, or other
  modified_base (5435)..(5436): a, c, g, t, unknown, or other
tttttttnttttttttttttttttttttctttaaatagttcacatttattattgataacaataaaaaaatcttttaaagactatcagtattgtattaccaagtgaggtaatatgtttacaaaacatttacagaatttgatatgcaaataacaaatttaggaaggaaagtgaattaagacataatagagggagaatcaaagaatcattagtactaagaaatgggaaatgacagcagcgttttaaaagagtggcaaggtactaaaggtagaaacacgatgcaaactgcatactcaaaccatagctgccccagaattcccttacaaggggagtgagattggattactcgggaggaaaccctgtaagcatttgtgcggtcatgtgctttgagctcttcaagatgcactacagtctttgggtataaaagaatgccactcccgaatcaacttaaaaagaacagatcttcagcctgggagggggcaggggatggctgcaattcaaacagttctataaacatctctgggcacatgaggactgttgagtgaagcattttcttggcagctgtcagcaaaatcgccatctgagacacagagaaagagaaagagaaagcagggaccaccttcaggcccttgtgatttgggaacaggaagcaccaggtggaagcagcacagacgcgctactaaccctacctacgaaccctacctacgaaccctacctacnanncctacctactagccctacctactagccctacctactagccctacctactanccctacctactanccctacctactagccctacctactagccctacctactanccctacctacnanccctacctacnaaccctacctacnaaccctacctacnanccctacctacnanccctacctacnaaccctacctactagccctacctactanccctacnctactagccctacctactaaccctacctacnanccctacctacnanccctacctactaaccctacctactagccctacctactagccctacctactaaccctacctactagccctacctacgaaccctacctactagccctacctactaaccctacctaccagccctacctacgaaccctacctactaaccctacctactagccctacctacnanccctacctacnaaccctacctacnanccctacctacnaaccctacctactagccctacctactaaccctacctaccagccctacctacgaaccctacctactaaccctacctactagccctacctactagccctacctactaaccctacctactagccctacctacgaaccctaccgcgctttccggaagcaaaggcttcaggtaccactgaggagctcgatctctaagagcaaacacaaatgtggtccaaaggcaggtgatcacagcacaggccctgggacgtctacagtgtgcaggcagccactagggctgacccgaccgggcaagagggctgctcggtccctcccccgccctcctgatccntgcacggggcacacatggcctccacacagctctccagtcacgcagcacccacacagtgccttcagagcggagctgagacggcacaaccaggatctccatgcctaccacgcacacagttgacagccgcgtggggttngnnntgaaaaacacggcctctgctgcacacagaaacacgtgttgcatgtccttatcgtggaggccatcccctatgcaacttctggacagattctcaaataacctgcttttcccataaaaagctgaaaaaataagggcctgtaccagatagagcaggctttaaaatcaggaattaaacaaaatgtaaaaggcaaacaaatcccatattctgatttgcttctgtgaagattccttcattactcaaactaagtttccactcaccccgtccccccagcacccccaccgtcatgcacacatgcacacacacagcacatgcacacacacacacgcatgagtccacaattcccatgtacaaagaagcaggactcctacatgccacacgccaccctgaagtggatgcgagagctgctgcttagctactaataaaaccccatggacagtgtcaagtggcaaatgcgacttgctggttccaagacggcctcctagtggctggaactgtctgggctctgagacaatgagccnccagagggcacagaggagatggcctacactgggctgggagctgactgcaggtgagaggggcgacgcacggaaggaaacgggaagaacncncccacccaagttcacatacagaaaaatcctgctctaaaaagtatcaaaaagatttgaaaaggaggaaagagaaagtaatgtttaacgatggcagcattttcctggagtcaccaggagtccctgagagcccctcctgagcccccggccccactgcagacagtgggtggtgtgggtgtgtctggccctgggacaaggtactccgcaggcaacctctgaatcctcagaggataaggacctcaagggctggccctaagtccacagaccatcttgactggcgggaagcatgggggccgtgaggcggcgtgcgggccatgaggcagcttgggggaagcgagctggcagcttccgtcccaggtgaggaggggccatctctggaggatgtcacaggaattcattcnntnntnnnnnntnnnnnnttnnttnnnnnnnttttttnnntnnntntntgagaccacgtcaatcctttaattggtacagaaactacttttctttcaagagagcccttgcgctctggttggattttgtgcacaacgtatacaaaatctatggctattgagttaagttaggatcagagttaaaactacctgccaaggtagttttgggatcaaacgactacgtttaccatctgagagctatttgctatctagaggtgagaggagtctgtacaatgtcgccgctgggtgggcgggtgcagctggctgtccgaggaggggcggccgtcccctctgcacactaggtgcaggcagcgcggcactacctggagatcatggagctggagtgggactggctggaggaggtggtggcggcactcagctgggagaagccgctgtggctggactccaggctcgtcatggaacctctgaaatcnctccgagccgatcacctcggtgtagtacatcactttacacttgtgcgaagagacctgcagggacgcaagcacgtcgtccacccggggaaggctgctggcggcgcacgcaggcatgctgtggaatttccactgcaggatgtagaagcccggccacctggtcacatgggaaccctgcacgctttctccttctttgcagatcagaggcgactccaccatgctgtagtcgcggcccagctgccagactttgtctatgagctgcacattgttcccacccggagaggtgatgctgtgggctcccagggagtcctttttgggtggttgtggcgacctcttggagtgatagatgttaaacacaatgtcccctttgcacacgtcgaaatcccaagtgatgactgacgaggcatccacaatctgaatgagaatctcatgtggggctcctttgaagacgcttgcagactggtagatggtctcagtccagagcttcaggtcttcgttctccagctcctctgcagtccggtacagagatttggggaccagtccaccctctggcacttcgcacatgcactccccactcaggaaatctggaataatctctttgtcgatgtaatccagcaggcctccaggaccctggtagtcatttcctgcataaatgaggaacttccttctggtgttgtcatcaatgaacggactaaccagcgtccagagcacaggaaataccctgggcgcccgcaggatgagaaggcggcccagtgtctcagggtagttggcctccaccacctcnnntgatccgcagncagcgctttncacaccaggtcnccacaagtggcgcatgttcagcccttccaagtccaccaggcaggtccatgagctgataggccgaccaaagacttttgtattctcttcgcatcgccttagccnttcttcatttanggagagaacgtatctcagcagggcttcctccccgagcgctctcaccaagccttnggtgtccatctgccccagcctgagcacgtagaggggccgcccatctttgtcgtgatgatgccagcctcccgcgtagtaatcctgaaggacctgaggaggggtccaggtttcaagaatgtagtctacctgatgctgctttctccacgtcaaagactgacacatgatctctctggctttgtcaatattaaaatcccgtgcacggaggaaccgaagaatatgctcatcttttggaattttgcccttgtgggtctcctggagccactggcgaagtctaatgaggcagctctcctgcagcggagtcaaatcgcccaggtatctcttgatgtagtcggcatctagtttgtcgtcaggggtgcccaccacgggctcaggtgcactggggctgctgagggcatcaccactcagcccctccttgagggcagcttctgggatgacgacggccatggacgctgcttgtttcttggaggatgatgaagatgtctctgaagagggcgtgatggaaggcggactccaacggggcacaaaggttatgccttcttcttctaattggcgaaggtagtattcgatgatttcctttnnttttttaatgttgctggtatattgtttcattgcaattttttccactgtactttcaaaaccaaagaaagatttaatatctaaacttgcagactgttcaaaacaggtccaatcttcattttcagggtgaacggtgtagcagcaatgctcattaatgatgacccgattggaaaacgtttcattataagcctcaatgtgcaaagtacgttcccgagaattcagtgagtttttctggacaaaataaacataatcaactcctgcaatcttcttcagcagtctgggtgcatctacatccagcttgcagcgcctttcaatgacatgaatagccccatcttcgctcttgaattcattcacagtgtcactgcccacgaacatcggaatcaaaggacatgtagggaacctcctttcataggcagccataattaattcaaaggggtatttgtacaccctcactggggactggtatttctgcaccatgattgcaatacaacagcaaccctctcacacctgtcttgttgaggataatcattaagaatggtactttatgctgaacatggtgagaggatattcaaacatacaaaactgaatatcctcaaggagcccgaagtctagctcttgtcagaaaggccgggcctgggacacggggtggcgaggggcgctcataccggcggctccgcggggcagtctcggttccactnntccgcgaccgtagctcgaccgccggttccggggagggggccggggagnngggagggggaaggggcgcggcgacggcacttg

SEQ ID NO: 4 - DNA, 1639 bp, Homo sapiens
agcagagcacacaagcttctaggacaagagccaggaagaaaccaccggaaggaaccatctcactgtgtgtaaacatgacttccaagctggccgtggctctcttggcagccttcctgatttctgcagctctgtgtgaaggtgcagttttgccaaggagtgctaaagaacttagatgtcagtgcataaagacatactccaaacctttccaccccaaatttatcaaagaactgagagtgattgagagtggaccacactgcgccaacacagaaattattgtaaagctttctgatggaagagagctctgtctggaccccaaggaaaactgggtgcagagggttgtggagaagtttttgaagagggctgagaattcataaaaaaattcattctctgtggtatccaagaatcagtgaagatgccagtgaaacttcaagcaaatctacttcaacacttcatgtattgtgtgggtctgttgtagggttgccagatgcaatacaagattcctggttaaatttgaatttcagtaaacaatgaatagtttttcattgtaccatgaaatatccagaacatacttatatgtaaagtattatttatttgaatctacaaaaaacaacaaataatttttaaatataaggattttcctagatattgcacgggagaatatacaaatagcaaaattgagccaagggccaagagaatatccgaactttaatttcaggaattgaatgggtttgctagaatgtgatatttgaagcatcacataaaaatgatgggacaataaattttgccataaagtcaaatttagctggaaatcctggatttttttctgttaaatctggcaaccctagtctgctagccaggatccacaagtccttgttccactgtgccttggtttctcctttatttctaagtggaaaaagtattagccaccatcttacctcacagtgatgttgtgaggacatgtggaagcactttaagttttttcatcataacataaattattttcaagtgtaacttattaacctatttattatttatgtatttatttaagcatcaaatatttgtgcaagaatttggaaaaatagaagatgaatcattgattgaatagttataaagatgttatagtaaatttattttattttagatattaaatgatgttttattagataaatttcaatcagggtttttagattaaacaaagaaacaattgggtacccagttaaattttcatttcagataaacaacaaataattttttagtataagtacattattgtttatctgaaagttttaattgaactaacaatcctagtttgatactcccagtcttgtcattgccagctgtgttggtagtgctgtgttgaattacggaataatgagttagaactattaaaacagccaaaactccacagtcaatattagtaatttcttgctggttgaaacttgtttattatgtacaaatagattcttataatattatttaaatgactgcatttttaaatacaaggctttatatttttaactttaagatgtttttatgtgctctccaaattttttttactgtttctgattgtatggaaatataaaagtaaatatgaaacatttaaaatataatttgttgtcaaagtaaaaaaaaaaaaaaa

SEQ ID NO: 5 - DNA, 424 bp, Homo sapiens
  modified_base (40)..(40): a, c, g, t, unknown, or other
atgtctcttgtcagctgtctttcagaagacctggtggggnaagtccgtgggcatcatgttgaccgagctggagaaagccttgaactctatcatcgacgtctaccacaagtactccctgataaaggggaatttccatgccgtctacagggatgacctgaagaaattgctagagaccgagtgtcctcagtatatcaggaaaaagggtgcagacgtctggttcaaagagttggatatcaacactgatggtgcagttaacttccaggagttcctcattctggtgataaagatgggctggcagcccacaaaaaaagccatgaagaaagccacaaagagtagctgagttactgcccagaggctgggcccctgacatgtacctgcagaataataaagtcatcaatacctcaaaaaaaaaaaaaaaaaaaaa

SEQ ID NO: 6 - DNA, 576 bp, Homo sapiens
actcttctggtccccacagactcagagagaacccaccatggtgctgtctcctgccgacaagaccaacgtcaaggccgcctggggtaaggtcggcgcgcacgctggcgagtatggtgcggaggccctggagaggatgttcctgtccttccccaccaccaagacctacttcccgcacttcgacctgagccacggctctgcccaggttaagggccacggcaagaaggtggccgacgccctgaccaacgccgtggcgcacgtggacgacatgcccaacgcgctgtccgccctgagcgacctgcacgcgcacaagcttcgggtggacccggtcaacttcaagctcctaagccactgcctgctggtgaccctggccgcccacctccccgccgagttcacccctgcggtgcacgcctccctggacaagttcctggcttctgtgagcaccgtgctgacctccaaataccgttaagctggagcctcggtggccatgcttcttgccccttgggcctccccccagcccctcctccccttcctgcacccgtacccccgtggtctttgaataaagtctgagtgggcggc

SEQ ID NO: 7 - DNA, 3025 bp, Homo sapiens
gcacgagcaggcagttcagattaaagaagctaattgatcaagaaatcaagtctcaggaggagaaggagcaagaaaaggagaaaagggtcaccaccctgaaagaggagctgaccaagctgaagtcttttgctttgatggtggtggatgaacagcaaaggctgacggcacagctcacccttcaaagacagaaaatccaagagctgaccacaaatgcaaaggaaacacataccaaactagcccttgctgaagccagagttcaggaggaagagcagaaggcaaccagactagagaaggaactgcaaacgcagaccacaaagtttcaccaagaccaagacacaattatggcgaagctcaccaatgaggacagtcaaaatcgccagcttcaacaaaagctggcagcactcagccggcagattgatgagttagaagagacaaacaggtctttacgaaaagcagaagaggagctgcaagatataaaagaaaaaatcagtaagggagaatatggaaacgctggtatcatggctgaagtggaagagctcataaaaatggaggagcagtgcagagatctcaataagaggcttgaaagggagacgttacagagtaaagactttaaactagaggttgaaaaactcagtaaaagaattatggctctggaaaagttagaagacgctttcaacaaaagcaaacaagaatgctactctctgaaatgcaatttagaaaaagaaaggatgaccacaaagcagttgtctcaagaactggagagtttaaaagtaaggatcaaagagctagaagccattgaaagtcggctagaaaagacagaattcactctaaaagaggatttaactaaactgaaaacattaactgtgatgtttgtagatgaacggaaaacaatgagtgaaaaattaaagaaaactgaagataaattacaagctgcttcttctcagcttcaagtggagcaaaataaagtaacaacagttactgagaagttaattgaggaaactaaaagggcgctcaagtccaaaaccgatgtagaagaaaagatgtacagcgtaaccaaggagagagatgatttaaaaaacaaattgaaagcggaagaagagaaaggaaatgatctcctgtcaagagttaatatgttgaaaaataggcttcaatcattggaagcaattgagaaagatttcctaaaaaacaaattaaatcaagactctgggaaatccacaacagcattacaccaagaaaacaataagattaaggagctctctcaagaagtggaaagactgaaactgaagctaaaggacatgaaagccattgaggatgacctcatgaaaacagaagatgaatatgagactctagaacgaaggtatgctaatgaacgagacaaagctcaatttttatctaaagagctagaacatgttaaaatggaacttgctaagtacaagttagcagaaaagacagagaccagccatgaacaatggcttttcaaaaggcttcaagaagaagaagctaagtcagggcacctctcaagagaagtggatgcattaaaagagaaaattcatgaatacatggcaactgaagacctaatatgtcacctccagggagatcactcagtctgcaaaaaaaaactaaatcaacaagaaaacaggaacagagatttaggaagagagattgaaaacctcactaaggagttagagaggtaccggcatttcagtaagagcctcaggcctagtctcaatggaagaagaatttccgatcctcaagtattttctaaagaagttcagacagaagcagtagacaatgaaccacctgattacaagagcctcattcctctggaacgtgcagtcatcaatggtcagttatatgaggagagtgagaatcaagacgaggaccctaatgatgagggatctgtgctgtccttcaaatgcagccagtctactccatgtcctgttaacagaaagctatggattccctggatgaaatccaaggagggccatcttcagaatggaaaaatgcaaactaaacccaatgccaactttgtgcaacctggagatctagtcctaagccacacacctgggcagccacttcatataaaggttactccagaccatgtacaaaacacagccactcttgaaatcacaagtccaaccacagagagtcctcactcttacacgagtactgcagtgataccgaactgtggcacgccaaagcaaaggataaccatcctccaaaacgcctccataacaccagtaaagtccaaaacctctaccgaagacctcatgaatttagaacaaggcatgtccccaattaccatggcaacctttgccagagcacagaccccagagtcttgtggttctctaactccagaaaggacaatgtccctattcaggttttggctgtgactggttcagctagctctcctgagcagggacgctccccagaaccaacagaaatcagtgccaagcatgcgatattcagagtctccccagaccggcagtcatcatggcagtttcagcgttcaaacagcaatagctcaagtgtgataactactgaggataataaaatccacattcacttaggaagtccttacatgcaagctgtagccagcccttcagcaccactgcaggataaccgaactcaaggcttaattaacggggcactaaacaaaacaaccaataaagtcaccagcagtattactatcacaccaacagccacacctcttcctcgacaatcacaaattacagtaagtaatatatataactgaccacgctcaccctcatccagtccatactgatatttttgcaaggaactcaatccttttttaatcatccctccatatcccccaagactgactgaactcgtactttgggaaggtttgtgcatgaactatacaagagtatctgaaactaactgttgcctgcatagtcatatcgagtgtgcacttactgtatatcttttcatttacatacttgtatggaaaatatttagtctgcacttgtataaatacatctttatgtatttgaaaaaaaaaaaa

SEQ ID NO: 8 - DNA, 4175 bp, Homo sapiens
tgaggagtcctgctcaagacacggtcactggatctgagaaacttcccaggggaccgcattccagagtcagtgactctgtgaagcacccacatctacctcttgccacgttcccacgggcttgggggaaagatggtggggaccaaggcctgggtgttctccttcctggtcctggaagtcacatctgtgttggggagacagacgatgctcacccagtcagtaagaagagtccagcctgggaagaagaaccccagcatctttgccaagcctgccgacaccctggagagccctggtgagtggacaacattgttcaacatcgactacccaggcgggaagggcgactatgagcggctggacgccattcgcttctactatggggaccgtgtatgtgcccgtcccctgcggctagaggctcggaccactgactggacacctgcgggcagcactggccaggtggtccatggtagtccccgtgagggtttctggtgcctcaacagggagcagcggcctggccagaactgctctaattacaccgtacgcttcctctgcccaccaggatccctgcgccgagacacagagcgcatctggagcccatggtctccctggagcaagtgctcagctgcctgtggtcagactggggtccagactcgcacacgcatttgcttggcagagatggtgtcgctgtgcagtgaggccagcgaagagggtcagcactgcatgggccaggactgtacagcctgtgacctgacctgcccaatgggccaggtgaatgctgactgtgatgcctgcatgtgccaggacttcatgcttcatggggctgtctcccttcccggaggtgccccagcctcaggggctgctatctacctcctgaccaagacgccgaagctgctgacccagacagacagtgatgggagattccgaatccctggcttgtgccctgatggcaaaagcatcctgaagatcacaaaggtcaagtttgcccccattgtactcacaatgcccaagactagcctgaaggcagccaccatcaaggcagagtttgtgagggcagagactccatacatggtgatgaaccctgagacaaaagcacggagagctgggcagagcgtgtctctgtgctgtaaggccacagggaagcccaggccagacaagtatttttggtatcataatgacacattgctggatccttccctctacaagcatgagagcaagctggtgctgaggaaactgcagcagcaccaggctggggagtacttttgcaaggcccagagtgatgctggggctgtgaagtccaaggttgcccagctgattgtcacagcatctgatgagactccttgcaacccagttcctgagagctatcttatccggctgccccatgattgctttcagaatgccaccaactccttctactatgacgtgggacgctgccctgttaagacttgtgcagggcagcaggataatgggatcaggtgccgtgatgctgtgcagaactgctgtggcatctccaagacagaggaaagggagatccagtgcagtggctacacgctacccaccaaggtggccaaggagtgcagctgccagcggtgtacggaaactcggagcatcgtgcggggccgtgtcagtgctgctgacaatggggagcccatgcgctttggccatgtgtacatggggaacagccgtgtaagcatgactggctacaagggcactttcaccctccatgtcccccaggacactgagaggctggtgctcacatttgtggacaggctgcagaagtttgtcaacaccaccaaagtgctacctttcaacaagaaggggagtgccgtgttccatgaaatcaagatgcttcgtcggaaagagcccatcactttggaagccatggagaccaacatcatccccctgggggaagtggttggtgaagaccccatggctgaactggagattccatccaggagtttctacaggcagaatggggagccctacataggaaaagtgaaggccagtgtgaccttcctggatccccggaatatttccacagccacagctgcccagactgacctgaacttcatcaatgacgaaggagacactttcccccttcggacgtatggcatgttctctgtggacttcagagatgaggtcacctcagagccacttaatgctggcaaagtgaaggtccaccttgactcgacccaggtcaagatgccagagcacatatccacagtgaaactctggtcactcaatccagacacagggctgtgggaggaggaaggtgatttcaaatttgaaaatcaaaggaggaacaaaagagaagacagaaccttcctggtgggcaacctggagattcgtgagaggaggctctttaacctggatgttcctgaaagcaggcggtgctttgttaaggtgagggcctaccggagtgagaggttcttgcctagtgagcagatccagggggttgtgatctccgtgattaacctggagcctagaactggcttcttgtccaaccctagggcctggggccgctttgacagtgtcatcacaggccccaacggggcctgtgtgcctgccttctgtgatgaccagtcccctgatgcctactctgcctatgtcttggcaagcctggctggggaggaactgcaagcagtggagtcttctcctaaattcaacccaaatgcaattggcgtccctcagccctatctcaacaagctcaactaccgtcggacggaccatgaggatccacgggttaaaaagacagctttccagattagcatggccaagccaaggcccaactcagctgaggagagcaatgggcccatctatgcctttgagaacctccgggcatgtgaagaggcaccacccagtgcagcccacttccggttctaccagattgagggggatcgatatgactacaacacagtccccttcaacgaagatgaccctatgagctggactgaagactatctggcatggtggccaaagccgatggaattcagggcctgctatatcaaggtgaagattgtggggccactggaagtgaatgtgcgatcccgcaacatggggggcactcatcggcggacagtggggaagctgtatggaatccgagatgtgaggagcactcgggacagggaccagcccaatgtctcagctgcctgtctggagttcaagtgcagtgggatgctctatgatcaggaccgtgtggaccgcaccctggtgaaggtcatcccccagggcagctgccgtcgagccagtgtgaaccccatgctgcatgagtacctggtcaaccacttgccacttgcagtcaacaacgacaccagtgagtacaccatgctggcacccttggacccactgggccacaactatggcatctacactgtcactgaccaggaccctcgcacggccaaggagatcgcgctcggccggtgctttgatggcacatccgatggctcctccagaatcatgaagagcaatgtgggagtagccctcaccttcaactgtgtagagaggcaagtaggccgccagagtgccttccagtacctccaaagcaccccagcccagtcccctgctgcaggcactgtccaaggaagagtgccctcgaggaggcagcagcgagcgagcaggggtggccagcgccagagtggagtggtggcctctctgagatttcctagagttgctcaacagcccctgatcaactaagttttgtggtacttcaccctcttctgccctcatttcatgtgacagccattgtgagactgatgcacaaactgtcacttggttaatttaagcacttctgttttcgtgaatttgcttgtttgtttcttcatgcctttacttactttgtcccatgctactgattggcacgtggcccccacaatggcacaataaagcccctttgtgaaactgttctttaaatgaaacacaagaaattggccactggtaaaactctgcagcttcaactgtacttcatttaatgccattaatgcaaatatacttcctcttctttttgcatggttttgcccacctctgcaatagtgataatctgatgctgaagatcaaataaccaatataaagcatatttcttggccttgctccacaggacataggcaagccttgatcatagttcatacatataaatggtggtgaaataaagaaataaaacacaatacttttactggaaaaaaaaaaaa

SEQ ID NO: 9 - DNA, 1547 bp, Homo sapiens
ggcacgagccagtctccgcgcctccacccagctcaggaacccgcgaaccctctcttgaccactatgagcctcccgtccagccgcgcggcccgtgtcccgggtccttcgggctccttgtgcgcgctgctcgcgctgctgctcctgctgacgccgccggggcccctcgccagcgctggtcctgtctctgctgtgctgacagagctgcgttgcacttgtttacgcgttacgctgagagtaaaccccaaaacgattggtaaactgcaggtgttccccgcaggcccgcagtgctccaaggtggaagtggtagcctccctgaagaacgggaagcaagtttgtctggacccggaagccccttttctaaagaaagtcatccagaaaattttggacagtggaaacaagaaaaactgagtaacaaaaaagaccatgcatcataaaattgcccagtcttcagcggagcagttttctggagatccctggacccagtaagaataagaaggaagggttggtttttttccattttctacatggattccctactttgaagagtgtgggggaaagcctacgcttctccctgaagtttacagctcagctaatgaagtactaatatagtatttccactatttactgttattttacctgataagttattgaaccctttggcaattgaccatattgtgagcaaagaatcactggttattagtctttcaatgaatattgaattgaagataactattgtatttctatcatacattccttaaagtcttaccgaaaaggctgtggatttcgtatggaaataatgttttattagtgtgctgttgagggaggtatcctgttgttcttactcactcttctcataaaataggaaatattttagttctgttttcttggggaatatgttactctttaccctaggatgctatttaagttgtactgtattagaacactgggtgtgtcataccgttatctgtgcagaatatatttccttattcagaatttctaaaaatttaagttctgtaagggctaatatattctcttcctatggttttagatgtttgatgtcttcttagtatggcataatgtcatgatttactcattaaactttgattttgtatgctattttttcactataggatgactataattctggtcactaaatatacactttagatagatgaagaagcccaaaaacagataaattcctgattgctaatttacatagaaatgtattctcttggttttttaaataaaagcaaaattaacaatgatctgtgctctgcaaagttttgaaaatatatttgaacaatttgaatataaattcatcatttagtcctcaaaatatatacagcattgctaagattttcagatatctattgtggatcttttaaaggttttgaccattttgttatgaggaattatacatgtatcacattcactatattaaaattgcacttttattttttcctgtgtgtcatgttggtttttggtacttgtattgtcatttggagaaacaataaaagatttctaaaccaaaaaaaaaaaaaaaaaaa

SEQ ID NO: 10 - DNA, 8992 bp, Homo sapiens
ctgaactagttgccagtgatcttgaaacgtgacagtaaccaagagataaataggtgacaatgacaggaaaattagatgtagtaaaagagagtgtttgagagcagaagctatggcaactaaagactggatttgaatccttcctagcttggtgacatgagcaaattacttgatttaagtgagcattttcccatctgtacagtggagataacgataattgtgcctgctaagaagaattgctgtgaagattagtgaaataatgcatgtaaaacatttggtacagtatgtgacacatagtacaaatagtttgctaggaagattgttattattcttcacttgtgatattgtgaagttttcatacagcaaattggacatcatgagatggattgattaaataaatagatttgaacttcaaggactggtagtgttcttgctttggaaagaagaaacttggtttatcctaataatagtaggataataatggtgaagtgataggtacaagtaatagtgtttatgatgcgctggtgatgataggaaaagaaagccattatatgggcaagagctagaagtaataaaatggtgcatttttcagtgatgtttggcctatgtagctattctctgataactataaaaatccttattattgaagattcttcaggaaaaaaaaacccttagtctgaaactttagcaccaatcccccttgccccccattgaaatacgtatttttaaaacatggcttttgataatgtgagggttttttcctttttgcgatttagcagtgctgattgtgtattgcagtagttgtgagagcattagaagcagcagtcgataggaggatggaaggtctggatgccgccttggggagttaggagattggcagacttaccctgtaccactctagccctactcctttgcccaagacagaaacacactgagatggataggagaatatgagcagttgataggaaagttctcagtggagtcaggatttaggttaggccaggagattgagaatataacagtttgtgtatgatgaaatggcatatttcacagaatgcagtaaaagcaggtagggtacaagtgcagcaacaggaagatgtcttttcttcattcagcaaacacttatttgagagcttaccatgtgctaggcacatacaaagataaataagatgcccttgatgatcctctatttaaaggagacatgtaaacaggttaacttagagtagagatggtgaatatgtgaacctgaggaaaggaagaaatagattaaattatctggagagagaggaaaagtcagcagaatggggacgagaatctttcggagctcagtgttctgataggagttatttccttgggcataggttccaagtatttttctaatataccatagaagccaggaaaactttcttctgttatctcaaatgatttaattactgacttgagtttgtgttgtctccttagacttgtgcaccatggacaattttgctgagggagatttcactgtggcggattatgccttgttagaagattgccctcacgtggatgattgtgtctttgctgctgaatttatgagcaatgattatgttcgtgtgactcagctttactgtgatggggtgggtgtgcaatataaagattatatccaaagtgagaggaatttggaatttgacatctgcagtatatggtgtagtaaaccaatttctgtcctgcaagattattgcgatgccattaaaataaacatcttctggccacttctgtttcaacatcaaaacagttccgtaatatcacgattgcatccctgtgtggacgccaacaattcacgtgcttctgagataaatttgaagaaactacaacatcttgagttgatggaagatattgtggatttggcaaagaaagttgctaatgattcattccttattggaggcttattgagaattggttgtaaaatagaaaataaaatcttggcaatggaagaagctctgaattggataaaatatgcaggcgatgtaacaattctaactaaattaggatcaattgacaattgttggcctatgttaagtattttctttactgaatgaaggagaactaatgaaaatgaaaggaaatgaagagttttccaaagaaagatttgatatagctattatctattacaccagagccattgaatatagacctgaaaactaccttctttatggtaaccgagctctttgttttcttcgtactggacagtttagaaatgcactcggtgatggaaagagagccactattctgaagaacacttggccaaagggtcattatcgttattgtgatgctctttctatgctgggggaatatgactgggccctgcaagcaaacataaaagctcaaaaactctgtaaaaatgaccctgagggaatcaaggatctaattcagcagcatgtaaagttacaaaaacaaatagaagacctacaaggtcgaacagcaaataaggatccaattaaagccttttatgaaaacagggcctacacacctaggagtttatcagcacctatatttactacttcacttaactttgtggagaaggaaagagatttcagaaaaattaatcacgaaatggccaacggtggtaatcagaatctaaaggtggcggatgaggcgttgaaggtagatgattgtgactgtcatcctgaattttcaccaccatcaagtcagcctccaaaacataaaggaaaacaaaaatctcgaaacaatgaatcagaaaagttcagttctagttcaccattgactttaccagcagatttgaagaacatcttggagaaacagttttctaaatcttccagagctgcacaccaggattttgctaatataatgaaaatgctgagaagcttaattcaagatggctatatggccttattggagcagcgttgccgcagcgctgcacaggcctttacagagttgctgaacggtttagatcctcaaaaaataaagcaattgaacctggccatgattaactatgttttggtcgtctatggacttgccatttctctccttggaataggacagcctgaggaattatctgaagccgaaaaccagtttaagaggattattgaacactaccccagtgagggccttgattgcttggcctactgtggaattggaaaagtgtatttgaaaaaaaacagatttctagaagctctcaatcactttgagaaagcaagaaccttgatttatcgtcttcctggagtgttaacttggcccacgagtaatgtgattattgaagagtctcagccacaaaaaataaagatgctgttagagaaatttgttgaagaatgcaagttccctccagtgccagatgccatttgttgctatcagaagtgccatggatattctaagatccagatatacataactgatccagactttaagggttttatacgcatcagctgttgccagtactgtaaaatagaatttcacatgaattgctggaagaagttaaaaactacaacctttaatgataaaattgacaaggattttctacaaggaatatgtcttacccctgactgtgaaggtgtcatttctaagattatcatcttcagcagtggtggtgaagttaaatgtgaatttgaacacaaggtcataaaagaaaaggttcctccaagacctattctgaaacagaaatgttctagcctagagaaactaagactgaaagaagacaaaaaattgaagagaaagatccaaaaaaaagaagcaaaaaagttagcacaagaaagaatggaggaggacttaagagaaagtaatccacccaaaaatgaagagcagaaagaaactgtagacaatgttcagcgttgtcagttccttgatgacagaattctacagtgtataaagcagtatgctgacaagattaaatccggcatacagaatacagccatgcttctcaaagaattgctttcttggaaagttttgagcacagaagactatacaacctgtttttctagcagaaattttctaaatgaagcagtggactatgttattcgccacttgattcaagaaaataacagagtaaagacaagaatatttctgcatgttttgagtgagcttaaagaagtggagcccaaattagccgcctggatccaaaaacttaatagctttggcttagatgccacaggaactttcttttctcgttatggagcatctcttaaactgcttgattttagtatcatgactttcctctggaatgagaaatatggtcacaaactagactctatagaaggaaagcaacttgattatttctctgagccagcatcattgaaggaagcccgttgtttaatatggctgctagaagaacacagagacaagttcccagcattgcatagtgctttagatgaattctttgatataatggacagccgctgtactgtgttaaggaaacaagatagtggtgaagcaccgtttagttcaaccaaggtgaaaaacaaaagcaagaaaaagaagccaaaggattcaaagcctatgttagttgggtctggaacaacttcagtaacttcaaataatgagatcatcacttcaagtgaagaccatagcaatcgaaattcagattctgcaggcccatttgcagtgcctgaccatcttcggcaagatgtagaagaattcgaagctctctatgaccaacacagtaacgaatatgttgtccgcaataagaagctatgggacatgaacccaaaacaaaaatgttcaactctatatgattacttctctcagtttttggaggaacatggtcccttggacatgagtaacaagatgttctctgcagaatatgagtttttcccagaagaaactcgacagatactagaaaaagcaggaggtttaaaaccttttctcttgggatgccctcgttttgttgtgattgacaactgtattgcactgaagaaggttgcatcacggctcaagaaaaaaaggaagaagaaaaacattaaaacaaaagtagaagaaatttcaaaagcaggggagtatgtacgagttaaactacaactgaatccagctgctagggaatttaaaccagatgtaaagtctaaaccagtgtcagattcatcttcagcaccagcttttgaaaatgtgaaacccaaacctgtgtctgcaaattctcccaagccagcttgtgaagatgtgaaggccaaaccagtatccgacaattcttctagacaagtttctgaggatgggcaacccaaaggggtctcttctaattctcctaaaccaggctctgaggatgcaaattacaagcgagtctcctgtaattcccccaaaccggttcttgaggatgtgaaaccaacttattgggctcaatcccatttggtcacaggatactgtacgtatcttcctttccagagatttgatatcacccagacaccgccagcatacataaacgtgttaccaggtttgccccagtacaccagcatatatacacccttggccagcctttctcctgaatatcagctaccaagatcagtaccagtggtgccgtcttttgtagccaatgacagagcagataaaaatgctgctgcctattttgagggtcatcatttgaatgctgagaatgttgctggtcaccagattgcctctgaaacacagatccttgagggctctttgggaatatctgtaaagtcacactgcagcacaggtgatgctcatacagtcctgagtgagtctaacagaaatgatgagcactgtggaaattctaacaacaaatgtgaagtaattccagaaagcaccagtgcagtaacaaacattccacacgtgcagatggttgccatacaggtatcttggaacataatacaccaagaagtcaatactgagccatataatccttttgaggaacgacaaggggaaatttcacggattgaaaaggagcaccaagtattacaagaccaacttcaagaagtgtatgaaaattatgagcagataaaacttaagggcttagaagagaccagggacctggaagagaagttgaaaaggcacttagaagaaaacaagatctcaaagacggaattagattggttccttcaagatttggaaagagaaattaaaaaatggcaacaggaaaaaaaagaaatccaagaaagactaaaatcactgaagaagaaaattaaaaaggtttcaaatgccagtgaaatgtatacccagaaaaatgatggaaaggaaaaggaacatgaattacatctggatcagtcccttgaaatcagcaacacacttacaaatgagaaaatgaaaatagaagagtatataaagaaagggaaagaggattatgaagagagtcatcagagagctgtggctgcagaggtatccgtacttgaaaactggaaggagagtgaagtgtataagctacagatcatggagtcacaagcagaagcctttctgaagaagctggggctgattagccgtgatcctgcagcatatcctgacatggagtctgatatacgttcatgggaattgtttctttctaatgttacaaaagaaattgagaaagcaaagtctcagtttgaagaacaaattaaggcaattaaaaatggttctcggctcagtgaactttctaaagtgcagatttctgagctttcatttcctgcctgtaacacggttcatcccgagttactccctgagtcttcaggccacgatggccaagggcttgtgacttctgcaagcgacgtgactggaaaccacgcagcacttcacagggatcctagtgtgttctctgctggtgattccccaggggaggctccttctgcgctgttgccagggccaccccctggtcagcctgaagccactcagctgacagggccaaaacgggctggccaggcagctctgtcagaacgaagccctgtggctgatcggaagcagcctgttcctccaggacgtgctgcgcgttcaagccagtctccaaaaaagccgttcaatagtattattgagcacctgtcagtggtattcccatgttacaacagcactgagcttgctggttttattaaaaaagtgcgaagcaaaaacaagaactcactctcaggattgagtattgatgaaattgtccaaagagtgacagaacacattctagatgaacagaaaaagaaaaagccaaacccaggaaaggacaagaggacttatgagcccagctctgccacccccgtgaccaggtcctcccagggctcaccctcggtggttgttgcaccatcacccaaaaccaaggggcagaaagcagaagatgtccctgtgaggattgcactgggtgcaagttcctgtgaaatatgccacgaggtgttcaaatcaaaaaacgtgcgtgtgctcaaatgtgggcacaagtatcacaaagggtgctttaagcagtggcttaaagggcagagcgcttgcccggcctgccagggtcgtgatctcctgacagaagagtcaccttctggaagaggctggcccagtcagaatcaggagctgccttcctgctcttctaggtagtcacacttcactaaagtgtcatccaccagtgtgttgaatccgaagaatgacaattttctaccactggtgtaaaaaacaaacatttgaagacccttgtgcattgtgtgtcacaaagctaaatacatggaaatcgttaatatcgctgatattaagtaatttccccactctgagtgaatactttgatgattgccaacagtggctaataaaatgacggctaccacactcatgggtcactggggctgcgcagggctctttgaggtgggtggcttcttttggaaagtactatgaacgtctcgaagcagtattctagtgataagaattcttaacatagccaagcgccccacgtttgttccccacgtttgttccccttttctgtttgaaaaacctgttctggtagctccacaagagagatgatactgactttttaaattttttacaagagtctgtattcctgatatgcctatatttttcctcaaagattctgcattttaaggatgggcataagcaaactatattttaataatttatagttaatgttaaaatattggctgatttagaccaaaagattcaaatctcctctttgtgaaatcccatctgcatttgattttttattattttatgttcccccgttagattgttttaagtgtttgcttttcatcttttatagatgtaatctgattttcaaaaatcattaacactttttaattagtatcgactaagactttttccccctggaatcgaggctgtgtgtccgtcatcccagcccccggttggagcctgctctttgaactccgctgccttccttagcagcttctgtcctcttctgtgagtcagtcagcgagtgcttgggatccgcatccagccgtgctgagcacacaacaggctgtgtgtggaaatggccaccaccattctccttccccaccccaccacaaaaagagaagctgtgtctttagacaaccctgaggtatctgtgttacaatcgttctgtgtttgatatttgtgtaaagtatgcatgcagtcttgtactgtgacctaagaacaaaactgtaactgcattagaaaccatgaaaaaattagatattgttttgtgacttttagacagtggtaaatatagaaccatgaattctggtcacattccatttctctccaacatgaaggatcaaaaaatgtttttcaatgtgttctttgttccactggaaacttagagtcatgagtttatgagctgatttggtcaccttcctctgcctttgttcactgtgagttctgatgtcttagtgacttagttcttagaagctcacgccttagtttgaaacagattctccacggtggtccccaaaacactgtctgcatatccataagaattgagcgctatgggtgttaacgtgcatgaggatcagtttgcagcagcaagtacaaaaggagaagaggaacatccgttgaatgagtgtgttttgtacataacttcagatacttgtgaacatgccttatatttgtccaacaactgtcagaataaagaacattctaaaatgag

SEQ ID NO: 11 - DNA, 667 bp, Homo sapiens
cgtgcaccctgagccggagctgcccagtcgccgcgggaccggggccgctggggtctggacgggggtcgccatgatccgctttatcctcatccagaaccgggcaggcaagacgcgcctggccaagtggtacatgcagtttgatgatgatgagaaacagaagctgatcgaggaggtgcatgccgtggtcaccgtccgagacgccaaacacaccaactttgtggaggtcttaaacgaatatttccacaatgtctgtgaactggacctggtgttcaacttctacaaggtttacacggtcgtggacgagatgttcctggctggcgaaatccgagagaccagccagacgaaggtgctgaaacagctgctgatgctacagtccctggagtgagggcaggcgagcaccccaccccggccccggcccctcctggaatcgcctgctcgcttccccttcccaggcccgtggccaacccagcagtccttccctcaactgcctaggaggaagggacccagctgggtctgggccacaagggaggagacttcaccccacttcctctgggccctggctgtgggcagaggccaccgtgtgtgtcccgagtaaccgtgccgttgtcgtgtgattccataagcgtctgtgcgtggagtccccaataaacctgtggtcctgcctggc

SEQ ID NO: 12 - DNA, 5316 bp, Homo sapiens
atcatggcggatggccccaggtgtaagcgcagaaagcaggcgaacccgcggcgcaataacgttacaaattataatactgtggtagaaacaaattcagattcagatgatgaagacaaactgcatattgtggaagaagaaagtgttacagatgcagctgactgtgaaggtgtaccagaggatgacctgccaacagaccagacagtgttaccagggaggagcagtgaaagagaagggaatgctaagaactgctgggaggatgacagaaaggaagggcaagaaatcctggggcctgaagctcaggcagatgaagcaggatgtacagtaaaagatgatgaatgcgagtcagatgcagaaaatgagcaaaaccatgatcctaatgttgaagagtttctacaacaacaagacactgctgtcatttttcctgaggcacctgaagaggaccagaggcagggcacaccagaagccagtggtcatgatgaaaatggaacaccagatgcattttcacaattactcacctgtccatattgtgatagaggctataaacgctttacctctctgaaagaacacattaaatatcgtcatgaaaagaatgaagataactttagttgctccctgtgcagttacacctttgcatacagaacccaacttgaacgtcacatgacatcacataaatcaggaagagatcaaagacatgtgacgcagtctgggtgtaatcgtaaattcaaatgcactgagtgtggaaaagctttcaaatacaaacatcacctaaaagagcacttaagaattcacagtggagagaagccatatgaatgcccaaactgcaagaaacgcttttcccattctggctcctatagctcacacataagcagtaagaaatgtatcagcttgatacctgtgaatgggcgaccaagaacaggactcaagacatctcagtgttcttcaccgtctctttcagcatcaccaggcagtcccacacgaccacagatacggcaaaagatagagaataaaccccttcaagaacaactttctgttaaccaaattaaaactgaacctgtggattatgaattcaaacccatagtggttgcttcaggaatcaactgttcaacccctttacaaaatggggttttcactggtggtggcccattacaggcaaccagttctcctcagggcatggtgcaagctgttgttctgccaacagttggtttggtgtctcccataagtatcaatttaagtgatattcagaatgtacttaaagtggcggtagatggtaatgtaataaggcaagtgttggagaataatcaagccaatcttgcatccaaagaacaagaaacaatcaatgcttcacccatacaacaaggtggccattctgttatttcagccatcagtcttcctttggttgatcaagatggaacaaccaaaattatcatcaactacagtcttgagcagcctagccaacttcaagttgttcctcaaaatttaaaaaaagaaaatccagtcgctacaaacagttgtaaaagtgaaaagttaccagaagatcttactgttaagtctgagaaggacaaaagctttgaagggggggtgaatgatagcacttgtcttctgtgtgatgattgtccaggagatattaatgcacttccagaattaaagcactatgacctaaagcagcctactcagcctcctccactccctgcagcagaagctgagaagcctgagtcctctgtttcatcagctactggagatggcaatttgtctcctagtcagccacctttaaagaacctcttgtctctcctaaaagcatattatgctttgaatgcacaaccaagtgcagaagagctctcaaaaattgctgattcagtaaacctaccactggatgtagtaaaaaagtggtttgaaaagatgcaagctggacagatttcagtgcagtcttctgaaccatcttctcctgaaccaggcaaagtaaatatccctgccaagaacaatgatcagcctcaatctgcaaatgcaaatgaaccccaggacagcacagtaaatctacaaagtcctttgaagatgactaactccccagttttaccagtgggatcaaccaccaatggttccagaagtagtacaccatccccatcacctctaaacctttcctcatccagaaatacacagggttacttgtacacagctgagggtgcacaagaagagccacaagtagaacctcttgatctttcactaccaaagcaacagggagaattattagaaaggtcaactatcactagtgtttaccagaacagtgtttattctgtccaggaagaacccttgaacttgtcttgcgcaaaaaaggagccacaaaaggacagttgtgttacagactcagaaccagttgtaaatgtaatcccaccaagtgccaaccccataaatatcgctatacctacagtcactgcccagttacccacaatcgtggccattgctgaccagaacagtgttccatgcttaagagcgctagctgccaataagcaaacgattctgattccccaggtggcatacacctactcaactacggtcagccctgcagtccaagaaccacccttgaaagtgatccagccaaatggaaatcaggatgaaagacaagatactagctcagaaggagtatcaaatgtagaggatcagaatgactctgattctacaccgcccaaaaagaaaatgcggaagacagaaaatggaatgtatgcttgtgatttgtgtgacaagatattccaaaagagtagttcattattgagacataaatatgaacacacaggtaaaagacctcatgagtgtggaatctgtaaaaaggcatttaaacacaaacatcatttgattgaacacatgcgattacattctggagaaaagccctatcaatgtgacaaatgtggaaagcgcttctcacactctgggtcttattctcaacacatgaatcatcgctactcctactgtaagagagaagcggaagaacgtgacagcacagagcaggaagaggcagggcctgaaatcctctcgaatgagcacgtgggtgccagggcgtctccctcacagggcgactcggacgagagagagagtttgacaagggaagaggatgaagacagtgaaaaagaggaagaggaggaggataaagagatggaagaattgcaggaagaaaaagaatgtgaaaaaccacaaggggatgaggaagaggaggaggaggaggaagaagtggaagaagaagaggtagaagaggcagagaatgagggagaagaagcaaaaactgaaggtctgatgaaggatgacagggctgaaagtcaagcaagcagcttaggacaaaaagtaggcgagagtagtgagcaagtgtctgaagaaaagacaaatgaagcctaatcgtttttctagaaggaaaataaattctaattgataatgaatttcgttcaatattatccttgcttttcatggaaacacagtaacctgtatgctgtgattcctgttcactactgtgtgtgtgtgcgcgtgcattgattactatccatttctttagtcaacgctctccacttcctgatttctgctttaaggaaaactgtgaactttctgcttcatgtatcagttttaaagcatcccaggcaaagatcatctacagattctaggaattctctcccctgaaatcaaaacctggagacttttttttcttattttagttgagaagttcataaactgctcaaggattagttttccaggactctgcggaggaacggcaggaagaacctcagagagggcagaggtgacttcaaagtgctggggactccgtcctgagggtcacttggccctgagcccctgcgtgcccttgcggaagcccagaagcttcttcctgctgcacctcccgtttccgctgctgctgacgtttatgcatttcatgatggggtccaacaagaacacctgacttgggtgaagttgtgcaatattggaggctgactgtagggctgggcagctgggagacaggctcatggctcatggctcatggctcagggcggtgcctgccctgggccgggacccccctccccaccccccacctaggctttttgggttttgttcaaggaaggtaaagtgagaggtttaggtcagtgtttttaagtttttgttttttttttaaagcaaatcctgtatatgtatctacatgggagataggtagacactacttatttgttacattttgtactatacgtttgtgttccaggtttcagcttccctcgctcctgttgttaagaagcgtccctgtcagcacaggtgtgcattgaggaaggggccccagggccttcgctccctcagcactggggtggaggcggcaggaaggggcggcccttacctggcaggtctgggcgcacctttagcaggtggactccgtggggctccaccagccagaagcctctggaaggcaacgaaggcaatgctgctccctgagtccagtccccgcccccaaacccagcccaggtgccttcagctacttcggcttcttaaaccctgcagtgttaaacagaggcattgagaaaggggaaaggcgggtatttttaaaagccaaagattgacccaagttacttgagggtagggaggcgggcccagtgcaggaggctgcatccctggcctgctggtgcccaccgggggctgtgcctgtgccgggccgcaggaagctggctgcccccattcctgctgctgctgctgctgctgctctgtggctgtttcaaagactgggcgaaaggctgtccggagggcagaccaggtgccttgccgcagagaaaacaccaaagtctcctgttcgctcataaagaagtttttgggatgggagagaatccagaccatcttggggcagccaggcccttgccttcatttttacagaggtagcacaactgattccaacacaaaaccccttcccctttttaaaatgatttctgttctaatgccatagatcaaaggcctcagaaaccattgtgtgtttcctctttgaagcaatgacaagcactttactttcacggtggtttttgttttttcttattgctgtggaacctcttttggaggacgttaaaggcgtgttttacttgtttttttaagagtgtgtgatgtgtgttttgtagatttcttgacagtgctgtaatacagacggcaatgcaatagcctatttaaagaactacgtgatctgattgagatgtacatagtttttttttttaccataactgaattattttatctcttatgttatcatgagaaatgtatgccaaatgattagttgatgtatgttttttaatttaatatttaaataaaatatttggaagg

SEQ ID NO: 13 - DNA, 972 bp, Homo sapiens
  modified_base (603)..(603): a, c, g, t, unknown, or other
tccacggtggcatccatgatgcatcgtcaggagactgtggagtgtttgcgcaagttcaatgcccggagaaaactgaagggtgccatcctcacgaccatgcttgtctccaggaacttctcagctgccaaaaacctattgaacaagaagtcggatggcggtgtcaagccaagaaacaactacaagctatagaatttaacaaagctttacttgctatgtacacaaaccaggctgaacaatgccgcaaaatatctgccagtttacagtcccaaagtcccgagcatctcttacctgtgttaatccaagctgcccagctctgccgtgaaaagcagcacacaaaagcaatagagctgcttcaggaattttcagatcagcatccagaaaatgcagctgaaattaagctgaccatggcacagttgaaaatttctcaaggtaatatttctaaagcatgtttaatattgagaagcatagaggagttaaagcataaaccaggcatggtatctgcattagttaccatgtatagccatgaagaagatattgatagtgccattgaggtcttcacacaagctatccagtggtatcaaaaccatcagccaaaatctcctnctcatttgtccttgataagagaagctgcaaacttcaaactcaaatatgggcggaagaaggaggcaattagtgacctacaacagctgtggaaacaaaatccaaaagatattcacaccctggcacagcttatttctgcttactcacttgtagatccagagaaagccaaagctcttagtaaacacttgccatcgtcagatagtatgtcactaaaagtagatgttgaggctcttgaaaattctgctggtgctacatacattcggaagaagggtggaaaagttactggagatagtcaaccaaaggaacaaggacagggagatttgaaaaagtagcaaaaaaaaaaaaaaaaaaacttaaagctatcgattctgg

SEQ ID NO: 14 - DNA, 2716 bp, Homo sapiens
aggctgaggggcggttgttgttggcagctgtggctaaggaggggagaacctctgctccccgcccgtcttctcttctgcgtttcccgggctagggggcgtggggagtggttttaggcggcgaagccgctcggcagcaccttccttctttgccaggcagacgcccgttgtagccgttggggaaccgttgagaatccgccatggagccagagagggaagggaccgagagacaccccaggaaggtcagggaaggcaggcaggccccaaataagctggtcggggcagctgaggcgatgaaagccggttgggatctcgaggagagtcagcccgaggccaagaaagcccgcttatctaccattttatttactgacaactgtgaagtaacccatgaccagctgtgtgaattgctgaagtatgcagttctgggcaaatccaatgttccaaaacccagctggtgccagctttttcatcaaaaccacctaaacaacgtagtggtttttgttctgcagggaatgagtcagctacacttttacaggttctatttggagtttggatgtcttcgaaaagcattcagacataaattccgcttgcctccaccatcatctgattttctagctgatgttgttgggctacaaactgaacaaagagctggagatctgcccaagacaatggaagggcctttaccttctaatgcaaaagccgccatcaaccttcaggatgatcccatcattcaaaagtatggctctaagaaagtgggcttgaccagatgccttctgacaaaggaggaaatgagaacgtttcactttccattacaaggttttcctgattgtgaaaactttttacttaccaaatgtaatggttctatagcagacaatagtcctctctttggacttgactgtgaaatgtgcctcacatccaaggggagagagctaacacgcatctcactggttgctgaaggaggctgctgtgttatggatgaactggtcaaacctgaaaacaagattctggactacctcaccagcttttcgggaatcacgaagaagattcttaacccagtgacgaccaaactcaaagatgtacagaggcagttaaaagcactgcttcctcctgatgctgtgttagtgggccactccttagatttggatctcagagcactgaaaatgatacatccatatgttattgatacatcgttgctttatgtcagagagcagggcagaagatttaagctcaagttcttagccaaagttattttggggaaggatatacagtgtccagacagacttggtcatgatgccacagaagatgctagaacaatccttgaattggctcggtatttccttaagcatggcccaaaaaagattgcagaactaaatctagaagcactagctaatcaccaagaaatacaagcagcaggccaagagcctaaaaacacagcagaagtacttcagcacccaaacacaagtgttttagaatgcttggattcagtgggtcagaagcttctttttttgacccgggagacagatgctggtgaacttccatcttccagaaattgtcaaactattaagtgtctttcaaataaagaggttcttgagcaggccagagtggaaatccccctgtttcccttcagcattgttcagttctcttttaaggccttttcacctgtcctcactgaggagatgaacaaaaggatgaggatcaagtggacagagatatcaactgtctatgctgggccatttagcaaaaattgcaatctcagggctctgaagaggctgtttaaaagctttggcccagtccagtcaatgacttttgttcttgaaacccgtcagcctcatctctgtatacagtatgaagtcctagaagctgcccagctggccatagagtccttggatggtattctggtagatggtatctgcatcaaggtgcagaggcctgtgacagagctcacgcttgattgtgacaccctcgtgaatgagctggaaggagattctgaaaaccaaggctctatatatctgtctggagtgagtgaaaccttcaaagaacagctattgcaggagccccgcctctttcttggcctggaagctgtgatcttgcctaaagatcttaaaagtggaaagcagaaaaaatactgtttcctgaaattcaaaagttttggcagtgcccagcaggccctcaacattctcacaggcaaggactggaagctgaaaggcaggcatgccctaacccccaggcacctccatgcctggctcagaggcttaccacctgaatcaacaaggctcccagggcttcgtgttgtacctcccccctttgaacaggaggccttgcagactctgaaactggaccacccgaagatagcagcctggcgctggagccggaagattggaaagctctacaacagcttgtgcccgggcactctctgcctcatcctgctgccaggaaccaagagcactcatggttcactctctggtctaggactgatgggaataaaagaggaagaagaaagcgctggcccaggcctgtgttcgtgagtcggcctgccatgtttccatgtgccatttcttaccccttgtaggcaatggcaaagaatgtggtcaggctgtagcctccccaaccagcagacagttttatggaaacttggtatagcagctaaaagagtttagtttgtttatatggcatgtataagttttcaataaatgcctaaagttcaagcataaaaaaaaaa

SEQ ID NO: 15 - DNA, 3508 bp, Homo sapiens
  modified_base (2673)..(2673): a, c, g, t, unknown, or other
  modified_base (2688)..(2688): a, c, g, t, unknown, or other
  modified_base (2695)..(2695): a, c, g, t, unknown, or other
  modified_base (2705)..(2705): a, c, g, t, unknown, or other
  modified_base (2708)..(2708): a, c, g, t, unknown, or other
  modified_base (2716)..(2716): a, c, g, t, unknown, or other
  modified_base (2724)..(2725): a, c, g, t, unknown, or other
  modified_base (2728)..(2728): a, c, g, t, unknown, or other
  modified_base (2757)..(2757): a, c, g, t, unknown, or other
  modified_base (2759)..(2759): a, c, g, t, unknown, or other
  modified_base (2763)..(2763): a, c, g, t, unknown, or other
  modified_base (2772)..(2772): a, c, g, t, unknown, or other
  modified_base (2784)..(2784): a, c, g, t, unknown, or other
  modified_base (2788)..(2788): a, c, g, t, unknown, or other
  modified_base (2794)..(2794): a, c, g, t, unknown, or other
  modified_base (2801)..(2801): a, c, g, t, unknown, or other
  modified_base (2805)..(2805): a, c, g, t, unknown, or other
  modified_base (2818)..(2818): a, c, g, t, unknown, or other
  modified_base (2828)..(2828): a, c, g, t, unknown, or other
  modified_base (2840)..(2840): a, c, g, t, unknown, or other
  modified_base (2861)..(2861): a, c, g, t, unknown, or other
  modified_base (2864)..(2865): a, c, g, t, unknown, or other
  modified_base (2934)..(2934): a, c, g, t, unknown, or other
cccaattccgccctgcccccgccgcggcggcgctagccgccactgagggaccgaccctataaaggccgctccgcgaggggtgcgcagcattcggcagagggcgccttcgacgggctgggctgtgcgcctgcgcagtgtgggtcgctcccgattccctgccccggccggccccgcctcggctccgcaccctcgccccgctctcagccgccgctctgccccgcagcagccagccccgtgtccggcagtatgttcagctgggtcagcaaggatgcccgccgcaagaaggagccggagctcttccagacggtggctgaggggctgcggcagctgtacgcgcagaagctgctacccctggaggagcactaccgcttccacgagttccactcgcccgcgctggaggacgctgacttcgacaacaagcctatggtgctcctcgtggggcagtacagcacgggcaagaccaccttcatccgacacctgatcgagcaggacttcccggggatgcgcatcgggcccgagcccaccaccgactccttcatcgccgtcatgcacggccccactgagggcgtggtgccgggcaacgcgctcgtggtggacccgcggcgccccttccgcaagctcaaccggtttggcaacgctttcctcaacaggttcatgtgtgcccagctgcccaaccccgtcctggacagcatcagcatcatcgacacccccgggatcctgtctggagagaagcagcggatcagcagaggctatgactttgcagccgtcctggagtggttcgcggattgttgggaccgcatcatcctgctcttcgacgcccacaagcaggacatctcccatgagttctcggaagtgatcaaggctctgaagaaccatgaggacaagatccgcatggtgctgaacaaggcagaccagatcgagacgcagcagctgatgcgggtgtacggggccctcatgtggtccctgggcaagatcatcaacacccccgaggtggtcagggtctacatcggctccttctggtcccacccgctcctcatccccgacaaccgcaagctctttgaggccgaggagcaggacctcttcaaggacatccagtcactgccccgaaacgccgccctcaggaagctcaatgacctgatcaagcgggcacggctggccaaggttcacgcctacatcatcagctccctcaagaaagagatgcccaatgtctttggtaaagagagcaaaaagaaagagctggtgaacaacctgggagagatctaccagaagattgagcgcgagcaccagatctcccctggggacttcccgagcctccgcaagatgcaggaactcctgcagacccaggacttcagcaagttccaggcgctgaagcccaagctgctggacacggtggatgacatgctggccaacgacatcgcgcggctgatggtgatggtgcggcaggaggagtccctgatgccttcccaggtggtcaagggcggcgcctttgacggcaccatgaacgggccgttcgggcacggctacggcgagggggccggcgagggcatcgacgacgtggagtgggtggtgggcaaggacaagccctcctacgacgagatcttctacacgctgtcccctgtcaacggtaagattacgggtgccaatgttaagaaggagatggtgaagtccaagctccccaacaccgagctagggaagatctggaagctggccgacgtggacaaggacgggctgctggacgacgaggagttcgcgctggccaaccacctcatcaaggtcaagctggagggccacgagctgcccgccgacctgcccccgcacctggtgccgccctccaagcgcagacatgagtgatggcgcccggccccgcacctgccatttgcacgcccggccgggaggcagagacggggggaggggaagcctcaccatttctcaaggtccataaagactgagcggatgtttcctcgcctctcgaaaaggaaaaccaccatctttcttttaaggctgttcctgggcctggcgggggaggcaggggtgagaggatggaattgtgtgcacaagaactgtggctattttaatataacgttagaggctgcgttctttgtcgccgcctcccctgtgtgccagccctgtgtgcacggcctctgccccccggcctttgctgtggctggagctggacagtgcagcgactgcgaccgtgggggagccaggtcgcccttttggcagctgctaggctgaggctgcatggacaggaacaccaggcaccctccgtgtgcttctgagctgaggttgcttcacgggaccgtggcttccttcctcacctggctctgcctcccccgtgctctcgggcgaagtgggttcttgtgccttcccctcccgggcccaggctccccgtgcgcgggccctgccctttcctcccgcgccccaccggctccgacgcgcaaccccgctcagcagtcacagaagcagggcccagccaccttggtctttttttgggagttcaggggagtaggagaatgtcttccagaaaaatacataagctagtttctgttctgtaaagtgatatctttcatacttgaccaaagttcccaataacttcccaaccactgttcaaaactgtgaatttttgtctccccttcccaccctccaaccaaggaacaaccctgcccagggggntaattaaggagtggnataacgnggggggattnacnccctttanccggaacnnganggcttgtaattttcctgaattgatggaangntttnttcaattcnccagcttcgttnccanaaaccntattaanttanagtgagagctctnggggaacccnaccctccgaacntttgggggagggttggtcggngcnnttggcaacccggcgggggccctaaacggacaagccccagtgatgggcaaagaatatgccagaggtcctngataccttttaagcccaagacaagggggagcagggacaaaaccagcccaatatgtaatcccctctcatttcctaccttccttcctcctctgtttagcaaaggagggcagctcacttggatgtccttacaacgcccctggcccccaggttgagcaataagaaaccagaaccttgcgcccagtggcccgggccagttcaggccgcctccccctcctctgcctggggccattgagcccagcctccagggcccgggcgcgtttgcagccagtggccactgtccgggctgtgatggcaccaaggcaggtggagcaccaggtaccacacagctgggcttcccaccaggctttcccgcgggggtctcagggagttctccccagcgctgcttgctcggagtctgcaggaactggccttgttctcctagcccgtcactccatacagtattaggtgaggatggatgcgggcgctgtccttgccgggaagtcactgttgaagttgcagtggcttgttcacacctgtgggaagagaagtgaagactttctccttgcattaaaaagtctgaactgtgaaaaaaaaaa

SEQ ID NO: 16 - DNA, 1449 bp, Homo sapiens
tcatactggagagaagccctacgtttgtgaagaatgtggcaaagcctttaagtactcccgtatccttactacacataagagaattcatactgaagagaaaccatacaagtgtaataaatgtggcaaagcctttattgcatcctcaacccttagtagacatgagttcattcatatgggaaagaaacattacaaatgtgaagaatgtggcaaagccttcatttggtcctcagtcctaactagacataagagagttcatactggagagaagccctacaaatgtgaagaatgtggcaaagcctttaagtactcctctacccttagttcacataagagaagtcatactggagagaaaccctacaaatgtgaagaatgtggcaaagcctttgttgcatcctcaacccttagtaaacatgagatcattcatactggaaagaaaccctacaagtgtgaagaatgtggcaaagcttttaaccagtcctcatcccttactaaacataagaaaattcatactggagagaaaccctacaaatgtgaagaatgtggcaaagcttttaaccagtcctcttcccttactaaacataagaaaatccattctggagagaaaccatacgagtgtgataaatgtggcaaagcctttatttcaccctcaagccttagtagacatgagataattcatactggggagaaaccctagaagtgtgaagaatgtggcaaagccttcaagtggtcctcacaccttactatacactgagagttctgaacttactctgtaaccatcccaaactcctcccaggcacagtctggcagaggtcctgccatttcggagacctggaggaagtggcccatttacagccatgtaggcaggcctgcagaccttggcctttactacggtacctgaagtggttcaatgactcagtttcagttacctgagccacagcttaaggtcagttctgcctatatagaaacccacacagttaacctgaggaaatgctctctggtactcactgaaagccacactcatccacatcctgatacaaggcccaccatatgcagacctgactgccaaaacatgccctagtgtctgccgtacagagtgaagtcctgaaggatatttagtctgtccaaaactaaaatgaagatttcaactccccaaccccctctaacaagccagctaaaggtggactatagtgcagacccagcaaccttgtgaccaagctaaaacccctcatcactacaaattcagagggcatctcatcaccctaagggcccaacgaaagatctttaccttctaacatcagtttatgaaaacttgaaaaggtgtttgctccatcaaattcagacaccagtacaaaactatattatgcccattgtctggttctattttaatgtagcactggaagtgtgtggcagaagaattagtcaaagaaataaaaatagccattgaaattg

SEQ ID NO: 17 - DNA, 5605 bp, Homo sapiens
  modified_base (2235)..(2235): a, c, g, t, unknown, or other
  modified_base (2659)..(2659): a, c, g, t, unknown, or other
  modified_base (2667)..(2667): a, c, g, t, unknown, or other
  modified_base (3334)..(3334): a, c, g, t, unknown, or other
  modified_base (5256)..(5256): a, c, g, t, unknown, or other
ggagtgggccaggccgccagccccgccagccccgccagccccgccagccccgcgatggcttgggccgcgctcctcggcctcctggccgcactgttgctgctgctgctactgagccgccgccgcacgcggcgacctggtgagcctcccctggacctgggcagcatcccctggttggggtatgccttggactttggaaaagatgctgccagcttcctcacgaggatgaaggagaagcacggtgacatctttactatactggttgggggcaggtatgtcaccgttctcctggacccacactcctacgacgcggtggtgtgggagcctcgcaccaggctcgacttccatgcctatgccatcttcctcatggagaggatttttgatgtgcagcttccacattacagccccagtgatgaaaaggccaggatgaaactgactcttctccacagagagctccaggcactcacagaagccatgtataccaacctccatgcagtgctgttgggcgatgctacagaagcaggcagtggctggcacgagatgggtctcctcgacttctcctacagcttcctgctcagagccggctacctgactctttacggaattgaggcgctgccacgcacccatgaaagccaggcccaggaccgcgtccactcagctgatgtcttccacacctttcgccagctcgaccggctgctccccaaactggcccgtggctccctgtcagtgggggacaaggaccacatgtgcagtgtcaaaagtcgcctgtggaagctgctatccccagccaggctggccaggcgggcccaccggagcaaatggctggagagttacctgctgcacctggaggagatgggtgtgtcagaggagatgcaggcacgggccctggtgctgcagctgtgggccacacaggggaatatgggtcccgctgccttctggctcctgctcttccttctcaagaatcctgaagccctggctgctgtccgcggagagctcgagagtatcctttggcaagcggagcagcctgtctcgcagacgaccactctcccacagaaggttctagacagcacacctgtgcttgatagcgtgctgagtgagagcctcaggcttacagctgcccccttcatcacccgcgaggttgtggtggacctggccatgcccatggcagacgggagagaattcaacctgcgacgtggtgaccgcctcctcctcttccccttcctgagcccccagagagacccagaaatctacacagacccagaggtatttaaatacaaccgattcctgaaccctgacggatcagagaagaaagacttttacaaggatgggaaacggctgaagaattacaacatgccctggggggcggggcacaatcactgcctggggaggagttatgcggtcaacagcatcaaacaatttgtgttccttgtgctggtgcacttggacttggagctgatcaacgcagatgtggagatccctgagtttgacctcagcaggtacggcttcggtctgatgcagccggaacacgacgtgcccgtccgctaccgcatccgcccatgacacagggagcagatggatccacgtgctcgcctctgcccagcctgccccagcctgccccagcctcccagctttctgtgtgcacagttggcccgggtgcaggtgctagcattaccacttccctgcttttctcccagaaggctgggtccaggggagggaaaagctaagagggtgaacaaagaaaagacattgaaagctctatggattatccactgcaaagttttctttccaaaatcaggctttgtctgctcccaattcacctcgttactctcacctcgtgatatccacaaatgctattcagataaggcagaactaggagtcttcactgctctgcccccaactcccggaggtgtcaccttcctagttcttatgagctagcatggcccgggccttatccagtcaaagcggatgctggccacagaaaggccactcaggatgtcctttgtgtccattgatgtcattcagcagtcagtcccccaataatccttaaactagctaaaaccaaaggagtcccttagaagatctgcttccctggggccccatttgccagattgccccattgctcacactacttgagaaaatgcaggagagcttcccccaaggctgatgcattcccggtgcagaacaggggcaccctccaaacactgggctctgaggagtggagttctctgttctagagtnacaggcaccagatgggatgggctttctcagtgtcagcactcaggtagggagctaaggaagacacagcccagacaagatggctggaaggagccagccaggactccttagactgatcaagccaaaaaagaaggtgccgatttcatgcattctagtgcagaagccccaactgtgatcacgatccagtctgcagacgtgttttgtttggacttcacttaaaaaaatgccttagttgttatcatctttgggagagttcattcaaaatgtccagcttctcttgaaaacttggtatatctggccacactgggctcacattcccaagggtaactcttggccagagctgagtggcagccgcctcccttatgcaggacatgtgctctcggcttcaccagggttctgaccgggtctgcttctgcattcacagcgnctcctggncctgaaggcatctgagtgtgagaccctgttctaactcttagaagtgacattgtaagaggtggtggggaccagctaattggtccaacccagcctgagtgcaccaccctttgaacaaatgtatcagtgatgaaaatttgcctttgccccggcttgcctgtaatcccagcactttgggaggccgaggtgggcggatcacttgaggtcgggagttcaagaccagcctggccaacatggcgaaaccccgtctctactaaacataaaaaaattagtcaggtgtggcggtgccgtgcctgtaatcccagctattcaggaggctgaggcaccagaattgcttgaacccaggaggtggaggttgcagtgaactgaagactgcgccacggcactccagcctgggcgacagagcaagactctgtctcaataaataaataattaattaaaataaaaaacagcttaaagagaaaaatggcctgcaaaccttttttatgatgctatttttattaatataaagtcctgtttattgagaccctttaaatgcctgcgagagaccctacagacagtatgtctactcctcacagcatctctatgaagagaaggagggttgtgcccacttcatagatgagaaaactgagaggtgaggtgacttgcctggggccacatagctcataanctgtagaactctgcaggcagatttactgtcccaggagcaaatgctggatgagcaactcctgttctttgggctcaaggggactggtgatgggacaattcttctcgacttcaggagctgacagagccagaggcacctaaacttgggtacatcttgtaagacacataatgaggtccctctagctttagctggagggagataaaagaaccccagacctctgaatgtcccagaggctagtctcttctcagagcagcactggggtttgggggcttccctgggcctcagcctccaggcacccccaggattcccagagagacgctgtgattggcaggaggcaggatatccccagggaaacccatcttcacgcctgggtgacccccactgccgcctccttcttaactctgcaggaaatcagagctggcagcctccagtgggaggacagagccggtttccgtggcaaccctcagctgcctcatcgtggctgggaagggaaggaagcaagccggcagaaatagctatggaaggtcttgcgcaggctgcaaccctggtgtgctgggcgaaaacccttatgactccccccttccaaatcaggctgggttgtcactgagactagattctcacctgccttcaaagaagggccaattccctttaaaggtcgcacctccttggaaccacagtcattagtgaattacactcaaggaaaagatgtgctcccaccaggcagctccagctgttacctgagatactgaagtgcagctcaggagacgattatttaaacctgcccttgttttaatcgttatttttctctttaaaaaaaatagaagctataaagaaaagagggagagatgagtgggttagctacctgctatgcgctagttaggaagttacctggatgccattgtatttcttcatcccttgcttaagaatcaaaattactggacatatgttaggaatactctttctttctttctttctttttaagctcagtggcaagaatgaaatactctttttttttttttttttttgagatggagtctcgctctgctgcccaggctagagtgcagtggcgtgatctcggctcactgcaagctctgcctcccgtgttcacaccattctcctgcctcagcctcctgagtagctgggactacaggcacccgccaccacacccggctaatttttggatttttagtagagatgggatttcaccgtattagccaggatggtcttgatctcctgagctcgtgatctgcccgcctcggcctcccaaagtgctgggattacaggtgtgagccaccgcgcccagccaagaataaaatactcttaagttgatctaatgaagtgtttccttaccattgtgattattgttactattatttgctatattttaatattgttgtttaccaaatattctcctttaaacagactcgctttttaaacttttttttttttttttgagacggagtttcacgcttattgcccaggctggagtgcaatggcacgatctcagctcaccacaacctccacctcctgggtttaagcaatgcttctgcctcagcttcccaagtagctgagattacaggcgcacaccaccacggccaactggtttttgtatttttagtagagacggggttcccccatgttggtcaggctggtctcgaaactcctgaccctcgtgatttgcctgcctggggcctcccaaagtgctaggattacaggcatgagccaccatgcccggcctaaactttgtttttaaaatgaactttttttccccccaattgctgccaatagtggataacatgtatcactcactgccaaaaatagaaagtgaccatgaaaaataaattcgctggggaagggggctccatgctggtgtggccaaggctgagagctctctcttctctgttacaaaacgagataagcaagtnttagaattgccttaaggccacactggcatctccctgaccttctccagggacagaagcaggagtaagtttctcatcccatgggcgaccagggccatctcctcccaccagtggcccccactcacagggagctggcaatgccctacctgcctgttctccagatggagaaacaggctctgagatttcacaggtcttgcccaaagtcattgattttaatgattaaaaagaataaacacagtgtttcctgagtagcagtgattgttatgccttgctattttaataaagattctattttcgtataacattgtcaagtggaaacatgctgaaatctattaaaccatctttgtttgtg

SEQ ID NO: 18 - DNA, 1781 bp, Homo sapiens
ggcacgaggggtggtggcagaggcgcctgcggttactggccgggccgacgggtcctgagtctccagagctcggtgaggcgtcccggaggcggcgatcacggttcttacatccccgcgtccccaggtttagcctgagcagggttgtggaaggccgggacccattgacagcacgatggtgacggagcaggaggtggatgccatcgggcagacgctggtggaccccaagcagcccctgcaggcccgcttccgggcgctgttcacgctgcgtgggctcggcggcccaggcgccattgcatggatcagccaggccttcgatgacgattccgccctgctcaagcacgagctggcctactgcctgggccagatgcaggatgcccgcgccatccccatgctggtggacgtgctgcaagacacccgtcaggagcccatggtgcgccatgaggcaggggaggccctgggggccatcggggacccggaagttctggagatcctgaagcagtattcctcggaccccgtcatcgaggtggccgagacctgccagctggccgtgcgcaggctggagtggctgcagcagcacggcggggagccggcggcgggaccctacctctccgtggaccctgccccgccggctgaggagcgtgacgtggggcgcctgcgggaggcgctgctggatgagtcccggccgctcttcgagcgataccgcgccatgttcgccctgcgcaacgcgggaggcgaggaggccgccctggcgctggccgagggtctgcactgtgggagcgccctcttccgccacgaggtcggctacgtcctgggacagctgcagcacgaggcggcggtgccccagctggcggccgccctggcccgatgcaccgagaaccccatggtgcggcacgagtgcgcggaggccctgggcgccattgcccggcccgcctgcctggccgcgctgcaggctcacgcggacgacccagagcgcgtggtgcgtgagagctgcgaggtggctctggacatgtatgagcacgagaccgggcgggccttccagtacgcggacggcctggagcagctgcgcggggccccctcctagggccccaccctcacccggagctcccggaggactcttgagggccgctcctcccccgcagagctttggcgtctaaaccgggtgtgtgtaaatcggtgtcatcgcttgtgtcttgctgggcgcacggttgctgtccccctcctccgtctgggaccgaggagctgccgttgtgctgtgactccctgagtcccctgactgctcctcggggcctggcgcagggctgtagcgtggaagtttccaggcttggggtgggactctgcgggaggctctgggatgcccggctcaggacaggggaggattgcgagggaagccaggggaggatcgcgagggaagccaggggaggatcgcgagggaagccaggggaggatcgcgagggaagccaggggaggatcgcgagggaagccaagggaggatcgcgaggggagccaggggaggatcgcgagggaagccaggggcagagctggggctctgggaagaggctgacgttatggtggcttcagcttcactaggaatgggacacagggtctgggggcctctgactcccccaccccgaggcctgggtagggacagggtggtggtccctgggtgggtcaggtagggcacaggggccagggagggacaagcagacctcagagcgctgcccagatggaatattaaattatttttgccaaaacaaaaaaaaaaaaaaaaaaaaaaaaaaaaa

SEQ ID NO: 19 - DNA, 1890 bp, Homo sapiens
cttaataagaagagaaggcttcaatggaaccttttgtggtcctggtgctgtgtctctcttttatgcttctcttttcactctggagacagagctgtaggagaaggaagctccctcctggccccactcctcttcctattattggaaatatgctacagatagatgttaaggacatctgcaaatctttcaccaatttctcaaaagtctatggtcctgtgttcaccgtgtattttggcatgaatcccatagtggtgtttcatggatatgaggcagtgaaggaagccctgattgataatggagaggagttttctggaagaggcaattccccaatatctcaaagaattactaaaggacttggaatcatttccagcaatggaaagagatggaaggagatccggcgtttctccctcacaaacttgcggaattttgggatggggaagaggagcattgaggaccgtgttcaagaggaagctcactgccttgtggaggagttgagaaaaaccaaggcttcaccctgtgatcccactttcatcctgggctgtgctccctgcaatgtgatctgctccgttgttttccagaaacgatttgattataaagatcagaattttctcaccctgatgaaaagattcaatgaaaacttcaggattctgaactccccatggatccaggtctgcaataatttccctctactcattgattgtttcccaggaactcacaacaaagtgcttaaaaatgttgctcttacacgaagttacattagggagaaagtaaaagaacaccaagcatcactggatgttaacaatcctcgggactttatggattgcttcctgatcaaaatggagcaggaaaaggacaaccaaaagtcagaattcaatattgaaaacttggttggcactgtagctgatctatttgttgctggaacagagacaacaagcaccactctgagatatggactcctgctcctgctgaagcacccagaggtcacagctaaagtccaggaagagattgatcatgtaattggcagacacaggagcccctgcatgcaggataggagccacatgccttacactgatgctgtagtgcacgagatccagagatacagtgaccttgtccccaccggtgtgccccatgcagtgaccactgatactaagttcagaaactacctcatccccaagagctttgataacaagataatgctggctgcataaaactagggcacaaccataatggcattactgacttccgtgctacatgatgacaaagaatttcctaatccaaatatctttgaccctggccactttctagataagaatggcaactttaagaaaagtgactacttcatgcctttctcagcaggaaaacgaatttgtgcaggagaaggacttgcccgcatggagctatttttatttctaaccacaattttacagaactttaacctgaaatctgttgatgatttaaagaacctcaatactactgcagttaccaaagggattgtttctctgccaccctcataccagatctgcttcatccctgtctgaagaatgctagcccatctggctgctgatctgctatcacctgcaactctttttttatcaaggacattcccactattatgtcttctctgacctctcatcaaatcttcccattcactcaatatcccataagcatccaaactccattaaggagagttgttcaggtcactgcacaaatatatctgcaattattcatactctgtaacacttgtattaattgctgcatatgctaatacttttctaatgctgactttttaatatgttatcactgtaaaacacagaaaagtgattaatgaatgataatttagtccatttcttttgtgaatgtgctaaataaaaagtgttattaattgctggttca

SEQ ID NO: 20 - DNA, 1056 bp, Homo sapiens
aagctgcactcctcaggcttccggtcttgtggaccgaggctcctctccaatcgtcctaaagcaactgaaggaacaattgataacaatttaaacatgttaatttatttaatctgatttggttgttaaaacagccttaaaactctcattcctatttcccagcaattgcaagagacgcctccgcggagccggcgctcagatgccaaaggctggagtcgttggtgacgtcatccagggctgggctatgcggggtggggccaagaagcaggaccaaagttccggtatgcgcgctttcagtcttcaattaggtccgaattcccggcatataagggcgttgctttgccttggcgtttaggtttcttaagttggttttagaagttgcttagtcatgtctggccgtggtaaaggtggaaaaggtttgggtaagggaggagctaagcgtcatcgcaaggttttgcgcgataacatccagggcatcactaagccagctatccggcgccttgctcgtcgcggcggtgtcaagcgaatttctggccttatctatgaggagactcgtggtgttctgaaggtgttcctggagaacgtgattcgtgacgctgtcacttacacagagcacgccaaacgcaagaccgtgacagcaatggatgtggtctacgcgctgaagcgacagggacgcactctttacggcttcggtggctaaggctcctgcttgctgcactcttattttcattttcaaccaaaggcccttttcagggccgcccacttttttcataaaagagcagacatcttgttatcctgctttgttccagatttttgctgagaagtagttactgtgcacatgtgtagatttgcaggtaacgtttaattactcgtgcttaatctcgcatgtttaggatttgggcataaagtagttaaagccactgttttctgcttgagggaagttggtatgttgaatatgtttagctttcttgtggcattttaacactagatatcagtgagtaagctggattgtgacagtttataattcccgtgggccttcctccttcagtttaagctgac

SEQ ID NO: 21 - DNA, 623 bp, Homo sapiens
atggcaggaaaatcttcactttttaaagtaattctctttggagatggtggagttggaaagagttatcttatgcacagatatgtaattaataggtttgatacccagctctttcatacataggtgtggaatttttaagtaaagatttggaagtggatggacattttggtaccaagtagaattgggacacagcaggtcaggagcgattctgaagcctgaggatgccattttacagaggttctgactgctgcctgcttacttttagtgttgacaattccaaagcttccagaacttaagtaactggaagaaagaattcttatatttcgctgatgtgaaagaacccaaaagctttccttttgtaattttgggtaacaagactgacagtgaacagcaggtgtctgcagaagaagcccaagcctggtgcagggacggcagcgactatccttaatttgaaacaagtgcaaaagatcgtcaaatgtggcagtagcatttgaaaagggggttccaagagttcttactaccagggataggtcagatcacttgactcagagagtgatggtctgacttcatcgaaaccattggtcaatcttcattgaaagcccaagcctagctcatcttgctgttga

SEQ ID NO: 22 - DNA, 3727 bp, Homo sapiens
gtcgcggtgtgctaagcgaggagtccgagtgtgtgagcttgagagccgcgcgctagagcgacccggcgagggatggcggccaccgggaccgcggccgccgcagccacgggcaggctcctgcttctgctgctggtggggctcacggcgcctgccttggcgctggccggctacatcgaggctcttgcagccaatgccggaacaggatttgctgttgctgagcctcaaatcgcaatgttttgtgggaagttaaatatgcatgtgaacattcagactgggaaatgggaacctgatccaacaggcaccaagagctgctttgaaacaaaagaagaagttcttcagtactgtcaggagatgtatccagagctacagatcacaaatgtgatggaggcaaaccagcgggttagtattgacaactggtgccggagggacaaaaagcaatgcaagagtcgctttgttacacctttcaagtgtctcgtgggtgaatttgtaagtgatgtcctgctagttccagaaaagtgccagtttttccacaaagagcggatggaggtgtgtgagaatcaccagcactggcacacggtagtcaaagaggcatgtctgactcagggaatgaccttatatagctacggcatgctgctcccatgtggggtagaccagttccatggcactgaatatgtgtgctgccctcagacaaagattattggatctgtgtcaaaagaagaggaagaggaagatgaagaggaagaggaagaggaagatgaagaggaagactatgatgtttataaaagtgaatttcctactgaagcagatctggaagacttcacagaagcagctgtggatgaggatgatgaggatgaggaagaaggggaggaagtggtggaggaccgagattactactatgacaccttcaaaggagatgactacaatgaggagaatcctactgaacccggcagcgacggcaccatgtcagacaaggaaattactcatgatgtcaaagctgtctgctcccaggaggcgatgacggggccctgccgggccgtgatgcctcgttggtacttcgacctctccaagggaaagtgcgtgcgctttatatatggtggctgcggcggcaacaggaacaattttgagtctgaggattattgtatggctgtgtgtaaagcgatgattcctccaactcctctgccaaccaatgatgttgatgtgtatttcgagacctctgcagatgataatgagcatgctcgcttccagaaggctaaggagcagctggagattcggcaccgcaaccgaatggacagggtaaagaaggaatgggaagaggcagagcttcaagctaagaacctccccaaagcagagaggcagactctgattcagcacttccaagccatggttaaagctttagagaaggaagcagccagtgagaagcagcagctggtggagacccacctggcccgagtggaagctatgctgaatgaccgccgtcggatggctctggagaactacctggctgccttgcagtctgacccgccacggcctcatcgcattctccaggccttacggcgttatgtccgtgctgagaacaaagatcgcttacataccatccgtcattaccagcatgtgttggctgttgacccagaaaaggcggcccagatgaaatcccaggtgatgacacatctccacgtgattgaagaaaggaggaaccaaagcctctctctgctctacaaagtaccttatgtagcccaagaaattcaagaggaaattgatgagctccttcaggagcagcgtgcagatatggaccagttcactgcctcaatctcagagacccctgtggacgtccgggtgagctctgaggagagtgaggagatcccaccgttccaccccttccaccccttcccagccctacctgagaacgaagacactcagccggagttgtaccacccaatgaaaaaaggatctggagtgggagagcaggatgggggactgatcggtgccgaagagaaagtgattaacagtaagaataaagtggatgaaaacatggtcattgacgagactctggatgttaaggaaatgattttcaatgccgagagagttggaggcctcgaggaagagcgggaatccgtgggcccactgcgggaggacttcagtctgagtagcagtgctctcattggcctgctggtcatcgcagtggccattgccacggtcatcgtcatcagcctggtgatgctgaggaagaggcagtatggcaccatcagccacgggatcgtggaggttgatccaatgctcaccccagaagagcgtcacctgaacaagatgcagaaccatggctatgagaaccccacctacaaatacctggagcagatgcagatttaggtggcagggagcgcggcagccctggcggagggatgcaggtgggccggaagatcccacgattccgatcgactgccaagcagcagccgctgccaggggctgcgtctgacatcctgacctcctggactgtaggactatataaagtactactgtagaactgcaatttccattcttttaaatgggtgaaaaatggtaatataacaatatatgatatataaaccttaaatgaaaaaaatgatctattgcagatatttgatgtagttttcttttttaaattaatcagaaaccccacttccattgtattgtctgacacatgctctcaatatataataaatgggaaatgtcgattttcaataatagacttatatgcaggctgtcgttccggttatgttgtgtaagtcaactcttcagcctcattcactgtcctggcttttatttaaagaaaaaaaaggcagtattccctttttaaatgagctttcaggaagttgctgagaaatggggtggaatagggaactgtaatggccactgaagcacgtgagagaccctcgcaaaatgatgtgaaaggaccagtttcttgaagtccagtgtttccacggctggatacctgtgtgtctccataaaagtcctgtcaccaaggacgttaaaggcattttattccagcgtcttctagagagcttagtgtatacagatgagggtgtccgctgctgctttccttcggaatccagtgcttccacagagattagcctgtagcttatatttgacattcttcactgtctgttgtttacctaccgtagctttttaccgttcacttccccttccaactatgtccagatgtgcaggctcctcctctctggactttctccaaaggcactgaccctcggcctctactttgtcccctcacctccaccccctcctgtcaccggccttgtgacattcactcagagaagaccacaccaaggaggggccgcggctggcccaggagagaacacggggaggtttgtttgtgtgaaaggaaagtagtccaggctgtccctgaaactgagtctgtggacactgtggaaagctttgaacaattgtgttttcgtcacaggagtctttgtaatgcttgtacagttgatgtcgatgctcactgcttctgctttttctttctttttattttaaaaaatctgaaggttctggtaacctgtggtgtatttttattttcctgtgactgtttttgttttgtttttttcctttttcctcccctttagccctattcatgtctctacccactatgcacagattaaacttcacctacaaactccttaatatgatctgtggagaatgtacacagtttaaacacatcaataaatactttaacttccaa

SEQ ID NO: 23 - DNA, 2087 bp, Homo sapiens
gcgagaagagcagacaccgtgctcctggaatcacccagcatgttgcaaggtctcctgccagtcagtctcctcctctctgttgcagtaagtgctataaaagaactccctggggtgaagaagtatgaagtggtttatcctataagacttcatccactgcataaaagagaggccaaagagccagagcaacaggaacaatttgaaactgaattaaagtataaaatgacaattaatggaaaaattgcagtgctttatttgaaaaaaaacaagaacctccttgcaccaggctacacggaaacatattataattccactggaaaggagatcaccacaagcccacaaattatggatgattgttattatcaaggacatattcttaatgaaaaggtttctgacgctagcatcagcacatgtaggggtctaaggggctacttcagtcagggggatcaaagatactttattgaacctttaagccccatacatcgggatggacaggagcatgcactcttcaagtataaccctgatgaaaagaattatgacagcacctgtgggatggatggtgtgttgtgggcccacgatttgcagcagaacattgccctacctgccaccaaactagtaaaattgaaagacaggaaggttcaggaacatgagaaatacatagaatattatctggtcctggataatggtgagtttaaaaggtacaatgagaatcaagatgagatcagaaagagggtatttgagatggctaattatgtcaacatgctttataaaaagctcaatactcatgtggccttagttggtatggaaatctggactgacaaggataagataaagataaccccaaatgcaagcttcaccttggagaatttttctaaatggagggggagtgttctctcaagaagaaagcgtcatgatattgctcagttaatcacagcaacagaacttgctggaacgactgtgggtcttgcatttatgtctacaatgtgttctccttattctgttggcgttgttcaggaccacagcgataatcttcttagagttgcagggacaatggcacatgaaatgggccacaactttggaatgtttcatgacgactattcttgcaagtgtccttctacaatatgtgtgatggacaaagcactgagcttctatatacccacagacttcagttcctgcagccgtctcagctatgacaagttttttgaagataaattatcaaattgcctctttaatgctccattgcctacagatatcatatccactccaatttgtgggaaccagttggtggaaatgggagaggactgtgattgtgggacatctgaggaatgtaccaatatttgctgtgatgctaagacatgtaaaatcaaagcaacttttcaatgtgcattaggagaatgttgtgaaaaatgccaatttaaaaaggctgggatggtgtgcagaccagcaaaagatgagtgcgacctgcctgaaatgtgtaatggtaaatctggtaattgtcctgatgatagattccaagtcaatggcttcccttgccatcacgggaagggccactgcttgatgggcacatgccccacactgcgggagcagtgcacagagctgtggggaccaggtaggaggacaaatcctttcccctgtgcatgtgcgaaggaaaatcatttcagatgacagtgtttaaccatggtcaaaagaccattctgtcctatccttcttagaagcttcgaactcaaaatcatggaaaggttttaagatttgaggttggttttagggttgctagatttagcaagtaaaaataaggatggccccgttaaattttaacttaaaattaacaagttttttgttaattttttgttttttgtctcagcatcagtatatcccatgcaatatttgaggtgtgctcatactaaaattatttgtgtatctgaaattcaaattaaactgggtgtctttttcttttcatctggcaaccctactaagatcataaacccttggaaatctgtgtgtgtgcgggtgtgtgtgtgtgtgtgtgtgcaggggtggcagaagtactgtgggatgggacagaaataaaaaaaaaaaaaaaaaaaaaaaaa

SEQ ID NO: 24 - DNA, 665 bp, Homo sapiens
agaggaaagaaccctgggaacgggaggcgaagggataatgagctggggatgggagcagtcgcaggaagaatcctctgcctggagccggcagactccaacccctcagcttgagactcaggagccccatagtccccacagcaataagaagcaccagctcctggtcccgaaaaaaggagggccccaactccagggactgcggcccgccctggagctgagaacacgcggactccagggagaggacagggcttcagggacccgagagccgctctgagcaccgggggatgtgactgcctcagcggcagagctggaagggccctcgaatgccattcacaggaacagcccaggaacccagggacttcagaaggtttgtccgaaaagtgagaggaggcggaggagagagcctgcgaggtcaagctgcagagaacatgagcttctacctccagatgtgccagggtgcatctcaataaacttggattttggccaggcgcggtggctcaggcctgtaatcccagctctggaagctgaaggatagcttgagcccaggagttcgaggctgcagtgagctatgatctcaccactacactccagcctgggtgacagcaagagatcttgtctcagaaataaataaataaaatttaaaaataaaaaaaaaaaaaaaaaaaaaa

SEQ ID NO: 25 - DNA, 1987 bp, Homo sapiens
ctcgagagctccgccatggccgctctcacccgggacccccagttccagaagctgcagcaatggtaccgcgagcaccgctccgagctgaacctgcgccgcctcttcgatgccaacaaggaccgcttcaaccacttcagcttgaccctcaacaccaaccatgggcatatcctggtggattactccaagaacctggtgacggaggacgtgatgcggatgctggtggacttggccaagtccaggggcgtggaggccgcccgggagcggatgttcaatggtgagaagatcaactacaccgagggtcgagccgtgctgcacgtggctctgcggaaccggtcaaacacacccatcctggtagacggcaaggatgtgatgccagaggtcaacaaggttctggacaagatgaagtctttctgccagcgtgtccggagcggtgactggaaggggtacacaggcaagaccatcacggacgtcatcaacattggcattgtcggctccgacctgggacccctcatggtgactgaagcccttaagccatactcttcaggaggtccccgcgtctggtatgtctccaacattgatggaactcacattgccaaaaccctggcccagctgaacccggagtcctccctgttcatcattgcctccaagacctttactacccaggagaccatcacgaatgcagagacggcgaaggagtggtttctccaggcggccaaggatccttctgcagtggcgaagcactttgttgccctgtctactaacacaaccaaagtgaaggagtttggaattgaccctcaaaacatgttcgagttctgggattgggtgggaggacgctactcgctgtggtcggccatcggactctccattgccctgcacgtgggttttgacaacttcgagcagctgctctcgggggctcactggatggaccagcacttccgcacgacgcccctggagaagaacgcccccgtcttgctggccctgctgggtatctggtacatcaactgctttgggtgtgagacacacgccatgctgccctatgaccagtacctgcaccgctttgctgcgtacttccagcagggcgacatggagtccaatgggaaatacatcaccaaatctggaacccgtgtggaccaccagacaggccccattgtgtggggggagccagggaccaatggccagcatgctttttaccagctcatccaccaaggcaccaagatgataccctgtgacttcctcatcccggtccagacccagcaccccatacggaagggtctgcatcacaagatcctcctggccaacttcttggcccagacagaggccctgatgaggggaaaatcgacggaggaggcccgaaaggagctccaggctgcgggcaagagtccagaggaccttgagaggctgctgccacataaggtctttgaaggaaatcgcccaaccaactctattgtgttcaccaagctcacaccattcatgcttggagccttggtcgccatgtatgagcacaagatcttcgttcagggcatcatctgggacatcaacagctttgaccagtggggagtggagctgggaaagcagctggctaagaaaatagagcctgagcttgatggcagtgctcaagtgacctctcacgacgcttctaccaatgggctcatcaacttcatcaagcagcagcgcgaggccagagtccaataaactcgtgctcatctgcagcctcctctgtgactcccctttctcttctcgtccctcctccccggagccggcactgcatgttcctggacaccacccagagcaccctctggttgtgggcttggaccacgagcccttagcagggaaggctggtctcccccagcctaacccccagcccctccatgtctatgctccctctgtgttagaattggctgaagtgtttttgtgcagctgacttttctgacccatgttcacgttgttcacatcccatgtagaaaaacaaagatgccacggaggaggt

SEQ ID NO: 26 - DNA, 1374 bp, Homo sapiens
gaataagccttcgataattatgaagggtgtttcggtatcttccctccaaaatgctaagaaataatttaggcaacagttcagactctaaaaatgaagatggctcggtcttttcacagactgaacacaatattgttgcaacttacttgattatggcaggtatgataagtattatcagcaacataatagttctgggcatcttcattaagtacaaggaacttcggacacccacaaatgcaattattattaacctggctgttactgatataggggtcagtagcattggctatcccatgtctgctgcctcagatctgtatggaagttggaaatttggatacgcaggctgtcaggtttatgctggattgaatattttttttggaatggcaagcattggattactcacggtcgtggctgtggaccgatacctgaccatctgccttcctgacgtagggagaagaatgaccaccaacacttacatcggcttgattctgggagcctggatcaatggcctgttttgggctttgatgcctatcatagggtgggctagttatgccccagatcctactggtgctacgtgtaccataaactggaggaaaaatgatagatcttttgtgtcttacaccatgacagttattgcgataaattttattgtgcccttgacagtgatgttttactgctattaccatgtcacgctatccattaaacatcacactaccagtgactgcactgagtccctcaacagagactggtcagatcagatagatgtaacaaagatgtctgtgatcatgatctgcatgtttctggtggcatggtccccttattccatcgtgtgcttatgggcttcttttggtgacccaaagaagattcctccccccatggccatcatagctccactgtttgcaaaatcttctacattctataacccctgcatttatgtggttgctaataaaaagtttcggagggcaatgcttgccatgttcaaatgtcagactcaccaaacaatgcctgtgacaagtattttacccatggatgtatctcaaaacccattggcttctggaagaatctgaaataagagaaaaggacacgctatcaaaacactttagttttttgacaatgcttttcttttaaatatgagcccatttagatcaagtgcagacatggatcattgtcctatgagagtgtaagctcctcaagcacagctcgtgcttccgtttgtgcactctggctgctgtagtgtatgcttctctgtgtcctgatatatcaacttattgctcatctcctttgatgaattaggcatcagaggttaaggtcccctttctttctccctattatggcatgcattacactgtactgatgacctttaacttgcctggctcc

SEQ ID NO: 27 - DNA, 2513 bp, Homo sapiens
gtcactcagcctatggagatgaagaaactgaggttcagagaggttaagagactccactgaggtcacacagccgatgacagacaaccttctgtgccttcatcaagctggttgtgtacccaccatgtccctggcgacaggattgggaaagaaaaagccctaattaaggatcgtcagaaaccacagttggaggaggacggcagagacagtttccctccccgctataccaacacccttccttcgaggtcctcgctcctgagggaccctggactgtcacagagattaatgaccccttattttctttggatgtgaaaggaaatcactggttaaagcttgatcgagagacattatcagctctttaaggattgcaggagaataggctactttattttctgaaaaggtaaatatatgcaagcaaagccaacatgccacgaatggcgttggtctaccacacagccgtgtctgggacacagttgggggtcatcccccagcaggagtgaagtcgagcttagcggcccttgtgtcctcccttggaattcctgccatcccttttgattgagcctccacctctgggatttttcttccatttttctcctctcttaggagggagttcctgctacccatcgtgggaggccaccatcaggactgcgaagatggtgaccctgcggaagaggaccctgaaagtgctcaccttcctcgtgctcttcatcttcctcacctccttcttcctgaactactcccacaccatggtggccaccacctggttccccaagcagatggtcctggagctctccgagaacctgaagagactgatcaagcacaggccttgcacctgcacccactgcatcgggcagcgcaagctctcggcctggttcgatgagaggttcaaccagaccatgcagccgctgctgactgcccagaacgcgctcttggaggacgacacctaccgatggtggctgaggctccagcgggagaagaagcccaataacttgaatgacaccatcaaggagctgttcagagtggtgcctgggaatgtggaccctatgctggagaagaggtcggtgggctgccggcgctgcgctgtggtgggcaactcgggcaacctgagggagtcttcttatgggcctgagatagacagtcacgactttgtcctcaggatgaacaaggcgcccacggcagggtttgaagctgatgttgggaccaagaccacccaccatctggtgtaccctgagagcttccgggagctgggagataatgtcagcatgatcctggtgcccttcaagaccatcgacttggagtgggtggtgagcgccatcaccacgggcaccatttcccacacctacatcccggttcctgcaaagatcagagtgaaacaggataagatcctgatctaccacccagccttcatcaagtatgtctttgacaactggctgcaagggcacgggcgatacccatctaccggcatcctctcggtcatcttctcaatgcatgtctgcgatgaggtggacttgtacggcttcggggcagacagcaaagggaactggcaccactactgggagaacaacccatccgcgggggcttttcgcaagacgggggtgcacgatgcagactttgagtctaacgtgacggccaccttggcctccatcaataaaatccggatcttcaaggggagatgacgcagtgaagggctgaggatggacgcactgtcacacctctgcatttccagccccagcatcttgctggagccgttccatcccggagcttggaggggcagcctcaggtgtgtgcctgggcaccgctcacagcctcttgcacccagccgttgacagcatctactcagcaaggtcactaagctctgccagcgtggcagagcatgtcttggaacctgtcttgagtgggacaacgtccccccactgctgccctagagctggggagacgctcagggaaaggttcaacctccacacactaaaatcatttgctcctgggcaagcttgggaatgaatgtggaagatcctatattctgagagacaggacagtttcccaggaagatgggcagagacttgagtggcgattacctccagcacagagacgtgccaggcggtgttggcgctcggggcgagatgctgcccttcttttgcacgaagcctggcctcttgcttggcgtgataaccctgtcatcttcccaaagctcatttatgagccaccagaggctcctaccccaaagatttcacagaaacttgaggccaggtgccgtggctcacacctgtaatctgaacactttgggaggccgaggcgggaggatcacttgagcccaggagttcaagaccagcctgggcaacatagtgagactcctgtctctacaaaaataaaagatttaaaaaaattagccaggcacggtggcacacacttgtagccccagctactagggaggctgaggagggaggatctcttgtgcctaggagttcgaggctgcagtgggctgtgatcacaccactgcactccagcctgggaacaag

SEQ ID NO: 28 - DNA, 1737 bp, Homo sapiens
gtggtcaccttccccagctagaaagccttctttttatatcaacttccttttaattatgaagtattacaatcaagcataaagacataataaatgttaacatctttcctttgtgtctgtttaaaaaatgtttcttattacagaaaatttcaaatagatttaaagtagagaaatgcacgtgatgaaaccccatgcacttgccattccatttcaatagttattacttcacggaagagttggcaatgatgagaacatgtcaaacacctggaaattcctgtctcattcaacagactcactaaataaaatcagcaaggtcaatgagtcaacagaatcacttactgatgagggtacagacatgaatgaaggacaactactgggagactttgagattgagtccaaacagctggaagcagagtcttggagtcggataatagacagcaagtttctaaaacagcaaaagaaagatgtggtcaaacggcaagaagtaatatatgagttgatgcagacagagtttcatcatgtccgcactctcaagatcatgagtggtgtgtacagccaggggatgatggcagatctgctttttgagcagcagatggtagaaaagctgttcccctgtttggatgagctgatcagtatccatagccaattcttccagaggattctggagcggaagaaggagtctctggtggataaaagtgaaaagaactttctcatcaagaggataggggatgtgcttgtaaatcagttttcaggtgagaatgcagaacgtttaaagaagacatatggcaagttttgtgggcaacataaccagtctgtaaactacttcaaagacctttatgccaaggataagcgttttcaagcctttgtaaagaagaagatgagcagttcagttgttagaaggcttggaattccagagtgcatattgcttgtaactcagcggattaccaagtacccagttttattccaaagaatattgcagtgtaccaaagacaatgaagtggagcaggaagatctagcacagtccttgagcctggtgaaggatgtgattggagctgtagacagcaaagtggcaagttatgaaaagaaagtgcgtctcaatgagatttatacaaagacagatagcaagtcaatcatgaggatgaagagtggtcagatgtttgccaaggaagatttgaaacggaagaagcttgtacgtgatgggagtgtgtttctgaagaatgcagcaggaaggttgaaagaggttcaagcagttcttctcactgacattttagttttccttcaagaaaaagaccagaagtacatctttgcatcattggaccagaagtcaacagtgatctctttaaagaagctgattgtgagagaagtggcacatgaggagaaaggtttattcctgatcagcatggggatgacagatccagagatggtagaagtccatgccagctccaaagaggaacgaaacagctggattcagatcattcaggacacaatcaacaccctttccgggaatggatggaggtgctttaactgatgcgagtctcacagagtcctatttcagcaccagctttattggagtcaatggatttggaagccctgtagaaacaaagtatcccttgatgcagtacactctggttgtcttccaacgtcttcgggtctgcacctctggattcagcaataccaaaaacaccggcccccaaacttcccacctacttgaaccaataaacttcctcttgtgtttaaact

SEQ ID NO: 29 - DNA, 629 bp, Homo sapiens
tgggagggagccatgaagcattacgaggtggagattctggacgcaaagacaagggagaagctgtgtttcttcgccgcgtggatggcctattacatcaatcaccctctctacactccccctacctacggagctcagcaggtgaaactggcgctcgccatctttgtgatctgccagctcggcaacttctccatccacatggccctgcgggacctgcggcccgctgggtccaagacgcggaagatcccataccccaccaagaaccccttcacgtggctcttcctgctggtgtcctgccccaactgcacctacgaggtggggtcctggatcggtttcgccatcatgacgcagtgtctcccagtggccctgttctccctggtgggcttcacccagatgaccatctgggccaagggcaagcaccgcagctacctgaaggagttccgggactacccgcccctgcgcatgcccatcatccccttcctgctctgagcagctcacccctgctgaggctcagcccctcaacccggtggcattctgggggaggagtggggcccacagctctccagcacccggaataaagcccgcctgtccccagtcggaacaaaaaaaaaaaaaaaaaaaaaaaaaaaaaa

SEQ ID NO: 30 - DNA, 3113 bp, Homo sapiens
aaaaagtacagagtccagggaaaagacttgcttgtaactttatgaattctggatttttttttttcctttgctttttcttaactttcactaagggttactgtagtctgatgtgtccttcccaaggccacgaaatttgacaagctgcacttttcttttgctcaatgatttctgctttaagccaaagaactgcctataatttcactaagaatgtcttctaattcagatactggggatttacaagagtctttaaagcacggacttacacctattgtgtctcaatttaaaatggtgaattactcctatgatgaagatctggaagagctttgtcccgtgtgtggagataaagtgtctgggtaccattatgggctcctcacctgtgaaagctgcaagggattttttaagcgaacagtccaaaataataaaaggtacacatgtatagaaaaccagaactgccaaattgacaaaacacagagaaagcgttgtccttactgtcgttttcaaaaatgtctaagtgttggaatgaagctagaagctgtaagggccgaccgaatgcgtggaggaaggaataagtttgggccaatgtacaagagagacagggccctgaagcaacagaaaaaagccctcatccgagccaatggacttaagctagaagccatgtctcaggtgatccaagctatgccctctgacctgaccatttcctctgcaattcaaaacatccactctgcctccaaaggcctacctctgaaccatgctgccttgcctcctacagactatgacagaagtccctttgtaacatcccccattagcatgacaatgccccctcacggcagcctgcaaggttaccaaacatatggccactttcctagccgggccatcaagtctgagtacccagacccctataccagctcacccgagtccataatgggctattcatatatggatagttaccagacgagctctccagcaagcatcccacatctgatactggaacttttgaagtgtgagccagatgagcctcaagtccaggctaaaatcatggcctatttgcagcaagagcaggctaaccgaagcaagcacgaaaagctgagcacctttgggcttatgtgcaaaatggcagatcaaactctcttctccattgtcgagtgggccaggagtagtatcttcttcagagaacttaaggttgatgaccaaatgaagctgcttcagaactgctggagtgagctcttaatcctcgaccacatttaccgacaagtggtacatggaaaggaaggatccatcttcctggttactgggcaacaagtggactattccataatagcatcacaagccggagccaccctcaacaacctcatgagtcatgcacaggagttagtggcaaaacttcgttctctccagtttgatcaacgagagttcgtatgtctgaaattcttggtgctctttagtttagatgtcaaaaaccttgaaaacttccagctggtagaaggtgtccaggaacaagtcaatgccgccctgctggactacacaatgtgtaactacccgcagcagacagagaaatttggacagctacttcttcgactacccgaaatccgggccatcagtatgcaggctgaagaatacctctactacaagcacctgaacggggatgtgccctataataaccttctcattgaaatgttgcatgccaaaagagcataagttacaacccctaggagctctgctttcaaaacaaaaagagattgggggagtggggagggggaagaagaacaggaagaaaaaaagtactctgaactgctccaagcaacgctaattaaaaacttgctttaaagatattgaatttaaaaaggcataataatcaaatacttaatagcaaataaatgatgtatcagggtatttgtattgcaaactgtgaatcaaaggcttcacagccccagaggattccatataaaagacattgtaatggagtggattgaactcacagatggataccaacacggtcagaagaaaaacggacagaacggttcttgtatatttaaactgatctccactatgaagaaatttaggaactaatcttattaattaggcttatacagcgggggatttgagcttacaggattcctccatggtaaagctgaactgaaacaattctcaagaatgcatcagctgtacctacaatagcccctccctcttcctttgaaggcccgagcacctctgccctgtggtcaccgaatctgtactaaggacctgtgttcagccacacccagtggtagctccaccaaatcatgaacagcctaattttgagtgtctgtgtcttagacctgcaaacagctaataggaaattctattaatatgttagcttgccattttaaatatgttctgagggttgttttgtctcgtgttcatgatgttaagaaaatgcaggcagtatccctcatcttatgtaagtgtgaattaatattaagggaaatgactacaaactttcaaagcaaatgctccatagctaaagcaacttagaccttatttctgctactgttgctgaaatgtggctttggcattgttggatttcataaaaaatttctggcaggaagtcttgttagtatacatcagtctttttcatcatccaagtttgtagttcatttaaaaatacaacattaaacacattttgctaggatgtcaaatagtcacagttctaagtagttggaaacaaaattgacgcatgttaatctatgcaaagagaaaggaaaggatgaggtgatgtattgactcaaggttcattcttgctgcaattgaacatcctcaagagttgggatggaaatggtgatttttacatgtgtcctggaaagatattaaagtaattcaaatcttccccaaaggggaaaggaagagagtgatactgacctttttaagtcatagaccaaagtctgctgtagaacaaatatgggaggacaaagaatcgcaaattcttcaaatgactattatcagtattattaacatgcgatgccacaggtatgaaagtcttgccttatttcacaattttaaaaggtagctgtgcagatgtggatcaacatttgtttaaaataaagtattaatactttaaagtcaaaaaaaaaaaaaaa

SEQ ID NO: 31 - DNA, 5190 bp, Homo sapiens
ccagaagttctccagggcttccgcagagcactttttcgctgcctgtgagctgcagcgcgggagagctcgggctcgcgcggaccccagcgcctggcaggctgacagcgctctctcgccccaggtgcccgcgcgcgtggtgagcagctgcaccaggtggcgtccggggtggggtcaatgaagtgcagcctgaggaagatgtggcgccctggagaaaagaaggagccccagggcgttgtctatgaggatgtgccggacgacacggaggatttcaaggaatcgcttaaggtggtttttgaaggaagtgcatatggattacaaaactttaataagcaaaagaaattaaaaacatgtgacgatatggacaccttcttcttgcattatgctgcagcagaaggccaaattgagctaatggagaagatcaccagagattcctctttggaagtgctgcatgaaatggatgattatggaaatacccctctgcattgtgctgtagaaaaaaaccaaattgaaagcgttaagtttcttctcagcagaggagcaaacccaaacctccgaaacttcaacatgatggctcctctccacatagctgtgcagggcatgaataatgaggtgatgaaggtcttgcttgagcatagaactattgatgttaatttggaaggagaaaatggaaacacagctgtgatcattgcgtgcaccacaaataatagcgaagcattgcagattttgcttaacaaaggagctaagccatgtaaatcaaataaatggggatgtttccctattcaccaagctgcattttcaggttccaaagaatgcatggaaataatactaaggtttggtgaagagcatgggtacagtagacagttgcacattaactttatgaataatgggaaagccacccctctccacctggctgtgcaaaatggtgacttggaaatgatcaaaatgtgcctggacaatggtgcacaaatagacccagtggagaagggaaggtgcacagccattcattttgctgccacccagggagccactgagattgttaaactgatgatatcgtcctattctggtagcgtggatattgttaacacaaccgatggatgtcatgagaccatgcttcacagagcttcattgtttgatcaccatgagctagcagactatttaatttcagtgggagcagatattaataagatcgattctgaaggacgctctccacttatattagcaactgcttctgcatcttggaatattgtaaatttgctactctctaaaggtgcccaagtagacataaaagataattttggacgtaattttctgcatttaactgtacagcaaccttatggattaaaaaatctgcgacctgaatttatgcagatgcaacagatcaaagagctggtaatggatgaagacaacgatgggtgtactcctctacattatgcatgtagacaggggggccctggttctgtaaataacctacttggctttaatgtgtccattcattccaaaagcaaagataagaaatcacctctgcattttgcagccagttatgggcgtatcaatacctgtcagaggctcctacaagacataagtgatacgaggcttctgaatgaaggtgaccttcatggaatgactcctctccatctggcagcaaagaatggacatgataaagtagttcagcttcttctgaaaaaaggtgcattgtttctcagtgaccacaatggctggacagctttgcatcatgcgtccatgggcgggtacactcagaccatgaaggtcattcttgatactaatttgaagtgcacagatcgcttggatgaagacgggaacactgcacttcactttgctgcaagggaaggccacgccaaagccgttgcgcttcttctgagccacaatgctgacatagtcctgaacaagcagcaggcctcctttttgcaccttgcacttcacaataagaggaaggaggttgttcttacgatcatcaggagcaaaagatgggatgaatgtcttaagattttcagtcataattctccaggcaataaatgtccaattacagaaatgatagaatacctccctgaatgcatgaaggtacttttagatttctgcatgttgcattccacagaagacaagtcctgccgagactattatatcgagtataatttcaaatatcttcaatgtccattagaattcaccaaaaaaacacctacacaggatgttatatatgaaccgcttacagccctcaacgcaatggtacaaaataaccgcatagagcttctcaatcatcctgtgtgtaaagaatatttactcatgaaatggttggcttatggatttagagctcatatgatgaatttaggatcttactgtcttggtctcatacctatgaccattctcgttgtcaatataaaaccaggaatggctttcaactcaactggcatcatcaatgaaactagtgatcattcagaaatactagataccacgaattcatatctaataaaaacttgtatgattttagtgtttttatcaagtatatttgggtattgcaaagaagcggggcaaattttccaacagaaaaggaattattttatggatataagcaatgttcttgaatggattatctacacgacgggcatcatttttgtgctgcccttgtttgttgaaataccagctcatctgcagtggcaatgtggagcaattgctgtttacttctattggatgaatttcttattgtatcttcaaagatttgaaaattgtggaatttttattgttatgttggaggtaattttgaaaactttgttgaggtctacagttgtatttatcttccttcttctggcttttggactcagcttttacatcctcctgaatttacaggatcccttcagctctccattgctttctataatccagaccttcagcatgatgctaggagatatcaattatcgagagtccttcctagaaccatatctgagaaatgaattggcacatccagttctgtcctttgcacaacttgtttccttcacaatatttgtcccaattgtcctcatgaatttacttattggtttggcagttggcgacattgctgaggtccagaaacatgcatcattgaagaggatagctatgcaggtggaacttcataccagcttagagaagaagctgccactttggtttctacgcaaagtggatcagaaatccaccatcgtgtatcccaacaaacccagatctggtgggatgttattccatatattctgttttttattttgcactggggaaataagacaagaaataccaaatgctgataaatctttagaaatggaaatattaaagcagaaataccggctgaaggatcttacttttctcctggaaaaacagcatgagctcattaaactgatcattcagaagatggagatcatctctgagacagaggatgatgatagccattgttcttttcaagacaggtttaagaaagagcagatggaacaaaggaatagcagatggaatactgtgttgagagcagtcaaggcaaaaacacaccatcttgagccttagctcctcagaccttcagtgaggcttctaatggggggtgcatgacttgctggttctaactttcaatttaaaaagagtgaggaagaagcagaatgattgattttactgcgtgtgaaatcatggttcctgcatgctatataaaagtaaaccatcttttatcctctattcatattttctaccaatcactatgtattggggatatctttgcagatatgttcaaattggactggactttgatgagatataatctcattatttgaatgggtagaaaatgaatttgctagaacacacatttttaatgaaaagaagtaataaatgtaactattaagctaaaatgcaaatgtcagtactgaattcctgcttgttaattacataatatgtgatgctctagaaaatagtcacaagtattaataatgccttagatgatagtcttaaatattaggttgaggtctacctaacctaagctgcttcctggaaagcttcatgttgaaagaacctatgggtggcaccatgtggacttttctgtccctactgtgatgaatagccccacccttcttgctgtccccaacacacctgatgtcactttgagccatatagttgaagtacaaattaataggccttatgatatgcacgaattttactatagataatatatgttgtttctggttttgtttgccaatgagcataataaatgtaaaacctatatagtatccctgtgattattgtatgagcctttgtttgagatttgaaaaaaacatggctccatcacatattcccttttttcttttgatgtctactcaaatcatgaattaatcacatacctcatcattaatcttttcaaggtccttctattgttttgtctgattttctccatcatcctgattagcatgtttattccctcactacccccaggagatattcactgtaatgaatatgtctttggctatgtatgtgtccttgtgttatgttgtacagtgttgttttgagtctgttattatttacacagatgttattatgctatagcttctatttctgtttttgcttcttatttctcttataattctcacttatttcctattttttctactcatttctatttgttactcctttttactggacatgatgtttacaagatacaactgtgttactgtattccatctagtacggggcctttggtgtggcttactatttcattgtgtgcacccacccacccaccacactggacttttctagagatggacagcttggttacctccaccttcctgcactcattctcaaacatactgatgttcatacaaaccagcagagtgctgagggacgatatgtactattacaaaaccagacacttttacattcatggtccaacagaacacatggcctagaggcaatgttgcatataccttaatctttgatatgaataatatctttgttctttatatttcttaaaacagaaagggtggaaaatcactatacagaagcaatatccaaagatctcctgatcataaagacaaggggtcttttcagtcttccctctcctcaaaccttgtgtagcattgcacaatatagatctcagtcaacattcactgagtgccaagaatgtgagaaacactgtaccatgcctgtcatgcgaaatatttaaataaacagattgtcttacag

SEQ ID NO: 32 - DNA, 2657 bp, Homo sapiens
tgggaacacaaacttgctggcgggaagagcccggaaagaaacctgtggatctcccttcgagatcatccaaagagaagaaaggtgacctcacattcgtgccccttagcagcactctgcagaaatgcctcctcagctgcaaaacggcctgaacctctcggccaaagttgtccagggaagcctggacagcctgccccaggcagtgagggagtttctcgagaataacgctgagctgtgtcagcctgatcacatccacatctgtgacggctctgaggaggagaatgggcggcttctgggccagatggaggaagagggcatcctcaggcggctgaagaagtatgacaactgctggttggctctcactgaccccagggatgtggccaggatcgaaagcaagacggttatcgtcacccaagagcaaagagacacagtgcccatccccaaaacaggcctcagccagctcggtcgctggatgtcagaggaggattttgagaaagcgttcaatgccaggttcccagggtgcatgaaaggtcgcaccatgtacgtcatcccattcagcatggggccgctgggctcacctctgtcgaagatcggcatcgagctgacggattcgccctacgtggtggccagcatgcggatcatgacgcggatgggcacgcccgtcctggaagcactgggcgatggggagtttgtcaaatgcctccattctgtggggtgccctctgcctttacaaaagcctttggtcaacaactggccctgcaacccggagctgacgctcatcgcccacctgcctgaccgcagagagatcatctcctttggcagtgggtacggcgggaactcgctgctcgggaagaagtgctttgctctcaggatggccagccggctggcagaggaggaagggtggctggcagagcacatgctgattctgggtataaccaaccctgagggtgagaagaagtacctggcggccgcatttcccagcgcctgcgggaagaccaacctggccatgatgaaccccagcctccccgggtggaaggttgagtgcgtcggggatgacattgcctggatgaagtttgacgcacaaggtcatttaagggccatcaacccagaaaatggctttttcggtgtcgctcctgggacttcagtgaagaccaaccccaatgccatcaagaccatccagaagaacacaatctttaccaatgtggccgagaccagcgacgggggcgtttactgggaaggcattgatgagccgctagcttcaggcgtcaccatcacgtcctggaagaataaggagtggagctcagaggatggggaaccttgtgcccaccccaactcgaggttctgcacccctgccagccagtgccccatcattgatgctgcctgggagtctccggaaggtgttcccattgaaggcattatctttggaggccgtagacctgctggtgtccctctagtctatgaagctctcagctggcaacatggagtctttgtgggggcggccatgagatcagaggccacagcggctgcagaacataaaggcaaaatcatcatgcatgacccctttgccatgcggcccttctttggctacaacttcggcaaatacctggcccactggcttagcatggcccagcacccagcagccaaactgcccaagatcttccatgtcaactggttccggaaggacaaggaaggcaaattcctctggccaggctttggagagaactccagggtgctggagtggatgttcaaccggatcgatggaaaagccagcaccaacgtcacgcccataggctacatccccaaggaggatgccctgaacctgaaaggcctggggcacatcaacatgatggagcttttcagcatctccaaggaattctgggacaaggaggtggaagacatcgagaagtatctggtggatcaagtcaatgccgacctcccctgtgaaatcgagagagagatccttgccttgaagcaaagaataagccagatgtaatcagggcctgagaataagccagatgtaatcagggcctgagtgctttacctttaaaatcattaaattaaaatccataaggtgcagtaggagcaagagagggcaagtgttcccaaattgacgccacctaataatcatcaccacaccgggagcagatctgaaggcacactttgatttttttaaggataagaaccacagaacactgggtagtagctaatgaaattgagaagggaaatcttagcatgcctccaaaaattcacatccaatgcatactttgttcaaatttaaggttactcaggcattgatcttttcagtgttttttcacttagctatgtggattagctagaatgcacaccaaaaagatacttgagctgtatatatatatgtgtgtgtgtgtgtgtgtgtgtgtgtgtgtgcatgtatgtgcacatgtgtctgtgtgatatttggtatgtgtatttgtatgtactgttattcaaaatatatttaatacctttggaaaatcttgggcaagatgacctactagttttccttgaaaaaaagttgctttgttattaatattgtgcttaaattatttttatacaccattgttccttacctttacataattgcaatatttcccccttactacttcttggaaaaaaattagaaaatgaagtttatagaaaag

SEQ ID NO: 33 - DNA, 468 bp, Homo sapiens
  modified_base (6)..(6): a, c, g, t, unknown, or other
  modified_base (9)..(10): a, c, g, t, unknown, or other
  modified_base (12)..(12): a, c, g, t, unknown, or other
  modified_base (15)..(15): a, c, g, t, unknown, or other
  modified_base (18)..(18): a, c, g, t, unknown, or other
  modified_base (30)..(30): a, c, g, t, unknown, or other
  modified_base (33)..(33): a, c, g, t, unknown, or other
  modified_base (36)..(36): a, c, g, t, unknown, or other
  modified_base (39)..(39): a, c, g, t, unknown, or other
  modified_base (42)..(42): a, c, g, t, unknown, or other
  modified_base (45)..(45): a, c, g, t, unknown, or other
  modified_base (51)..(51): a, c, g, t, unknown, or other
  modified_base (57)..(57): a, c, g, t, unknown, or other
  modified_base (60)..(60): a, c, g, t, unknown, or other
  modified_base (71)..(72): a, c, g, t, unknown, or other
  modified_base (75)..(75): a, c, g, t, unknown, or other
  modified_base (78)..(78): a, c, g, t, unknown, or other
  modified_base (93)..(93): a, c, g, t, unknown, or other
  modified_base (99)..(99): a, c, g, t, unknown, or other
  modified_base (129)..(129): a, c, g, t, unknown, or other
  modified_base (132)..(132): a, c, g, t, unknown, or other
  modified_base (135)..(135): a, c, g, t, unknown, or other
  modified_base (138)..(138): a, c, g, t, unknown, or other
  modified_base (148)..(150): a, c, g, t, unknown, or other
  modified_base (153)..(153): a, c, g, t, unknown, or other
  modified_base (156)..(156): a, c, g, t, unknown, or other
  modified_base (159)..(159): a, c, g, t, unknown, or other
  modified_base (291)..(291): a, c, g, t, unknown, or other
  modified_base (294)..(294): a, c, g, t, unknown, or other
  modified_base (318)..(318): a, c, g, t, unknown, or other
  modified_base (321)..(321): a, c, g, t, unknown, or other
  modified_base (331)..(331): a, c, g, t, unknown, or other
  modified_base (333)..(333): a, c, g, t, unknown, or other
  modified_base (339)..(339): a, c, g, t, unknown, or other
  modified_base (384)..(384): a, c, g, t, unknown, or other
  modified_base (387)..(387): a, c, g, t, unknown, or other
  modified_base (405)..(405): a, c, g, t, unknown, or other
  modified_base (414)..(414): a, c, g, t, unknown, or other
  modified_base (448)..(448): a, c, g, t, unknown, or other
  modified_base (451)..(451): a, c, g, t, unknown, or other
  modified_base (454)..(454): a, c, g, t, unknown, or other
  modified_base (458)..(458): a, c, g, t, unknown, or other
atggtncanntnacnccngtggagaagtcngcngtnacngcnctntggggnaaggtnaangtggatgaagnnggnggngaggccctgggcagnctgctngtggtctacccttggacccagaggttcttngantcnttnggggatctgnnnacnccngangcagttatgggcaaccctaaggtgaaggctcatggcaagaaagtgctcggtgcctttagtgatggcctggctcacctggacaacctcaagggcacctttgccacactgagtgagctgcactgtgacaagctncangtggatcctgagaacttcaggctnctnggcaacgtgntngtctgngtgctggcccatcactttggcaaagaattcaccccaccagtgcangcngcctatcagaaagtggtngctggtgtngctaatgccctggcccacaagtatcactaagctngcnttnttgntgtccaattt

SEQ ID NO: 34 - DNA, 2148 bp, Homo sapiens
gactgggtttgttgtgaagttgcggtgatccagcgcagagccccgtcctgattgatcgcatcgcggggctcagatgactgtaaaatgaatagatgaaattcttgcttctcgaagattttcttgggcatctcccggaaagtgcgttttaaggcgaagtcatgatgtattctcccatctgtctcactcaggatgaatttcacccattcatcgaggcacttcttccacatgtccgtgcaattgcctatacttggttcaacctgcaggctcgaaaacgcaagtactttaaaaagcatgagaagcgaatgtcaaaggatgaagaaagagcagtcaaagatgagcttctcagtgaaaagcctgaaatcaaacagaagtgggcatccaggctccttgccaaactgcgcaaagatattcgccaggagtatcgagaggactttgtgctcaccgtgactggcaagaagcacccgtgctgtgtcttatccaatcccgaccagaagggtaagattaggagaatcgactgcctgcgacaggcagacaaagtctggcgtctggatctagtcatggtgatcctgttcaaaggcatccccttggaaagtaccgatggagagcggctcatgaaatccccacattgcacaaacccagcactttgtgtccagccacatcatatcacagtatcagttaaggagcttgatttgtttttggcatactacgtgcaggagcaagattctggacaatcaggaagtccaagccacaatgatcctgccaagaatcctccaggttaccttgaggatagttttgtaaaatctggagtcttcaatgtatcagaacttgtaagagtatccagaacgcccataacccagggaactggagtcaacttcccaattggagaaatcccaagccaaccatactatcatgacatgaactcgggggtcaatcttcagaggtctctgtcttctccaccaagcagcaaaagacccaaaactatatccatagatgaaaatatggaaccaagtcctacaggagacttttacccctctccaagttcaccagctgctggaagtcgaacatggcacgaaagagatcaagatatgtcttctccgactactatgaagaagcctgaaaagccattgttcagctctgcatctccacaggattcttccccaagactgagcactttcccccagcaccaccatcccggaatacctggagttgcacacagtgtcatctcaactcgaactccacctccaccttcaccgttgccatttccaacacaagctatccttcctccagccccatcgagctacttttctcatccaacaatcagatatcctccccacctgaatcctcaggatactctgaagaactatgtaccttcttatgacccatccagtccacaaaccagccagtcctggtacctgggctagcttggttcctttccaagtgtcaaataggacacccatcttaccggccaatgtccaaaattacggtttgaacataattggagaacctttccttcaagcagaaacaagcaactgagggaaaaagaaacacaacaatagtttaagaaattttttttttaaataaaaaaaaaggaaaagaggaagactggacaaaacaacacaaaggcagaaaggaaagaaactgaagaaagaagataatagaccagcaattgcagcacttacaatcactaattcccttaaggttgaaactgtaatgacataaaaagggtcgatgatatttcactgatggtagatcgcagcccctgcaacgtagcctttgttacatgaagtccgctgggaaatagatgttctgtctctatgacaatatattttaactgactttctagatgccttaatatttgcatgataagctagttttattggtttagtattcttgttgtttacgcatggaatcactattcctggttatctcaccaacgaaggctaggaggcggcgtcagaggtgctgggtgacagagccatgagccagccattttataagcactctgatttctaaaagttaaaaaaaatatatgaaatctctgtagcctttagttatcagtacagatttattaaatttcggcccttaacccagccttttccagtgtgtaacccagtttgaaatcttaaaaaaagaaaaaaaaaaaaaaaa

SEQ ID NO: 35 - DNA, 488 bp, Homo sapiens
cagactcagagagaacccaccatggtgctgtctcctgccgacaagaccaacgtcaaggccgcctggggtaaggtcggcgcgcacgctggcgagtatggtgcggaggccctggagaggatgttcctgtccttccccaccaccaagacctacttcccgcacttcgacctgagccacggctctgcccaggttaagggccacggcaagaaggtggccgacgcgctgaccaacgccgtggcgcacgtggacgacatgcccaacgcgctgtccgccctgagcgacctgcacgcgcacaagcttcgggtggacccggtcaacttcaagctcctaagccactgcctgctggtgaccctggccgcccacctccccgccgagttcacccctgcggtgcacgcctccctggacaagttcctggcttctgtgagcaccgtgctgacctccaaataccgttaagctggagcctcggtggccatgcttcttgccccttgggc

SEQ ID NO: 36 - DNA, 2566 bp, Homo sapiens
cgctttttttttttttttctttttttgagatggagcttgctctgtcacccaggctggagtgcagtggcacgatcacagctcactgcaacttccgccacctgggttcaagcaattttcctgcttcaacctcccgagtagttgagattacaggcacgtgccaccacacctgactgatttttgtatttttagtagagacagggtttcaccatgttggccaggctggtcttgaactcctgacctcaagtgatccacccacctcagtctaccaaagtgctgggattacaggttgtgagccactgcacccggcctctgtctgacttttaaatgatggagtatcccagaggtcaggctttagagctcttctttcttccatctacagagtgctcatttctttggtgatctcattcagtctcacggctttgaatgttatatgctgataagtcccaactttctctgtctcgcctaaacttcccctaatagcagaacctgatatcaaagtgcctatttgacatctccacttagatatctaataagcatctttaatgtaaaatttccaaaactgagctcctacaattccctcccacacttgttcagttttccccatctaagctaatggcaactccatccctccagttgctttggccaaaacttttgagttgtctttgactgctttttttctcccttcttacattgtgctcatcctttctttcaggcaaattctgtttggtataccttcaaatatatctagaattctatacttctcactacccctcattcccattatctttgaaacacactccaatgaggtttttacccccactattccaccaaaaacactcttgtgaaagtcaccagatgatggttcttcaggctatcatctgtctcctgaattattttaagagcctccctaactggtctccttgttccagcccctgctcccttcactctattctcaatacaacagtcagagggatcttataaaaccgtaagtcagatcatataattctgtgtgaaaccctccaatgttatcccacttcagagtaaaagttaaagggtttattttgatctctaaatattttgatccctatgatctagtctcttcttacccaaagtatgggcctcataccagcagaactggcattctctgggagcttgttagaaatgtagaatctctggtcctaagattttctaaatcagaatctgcattttcatcagctctcttggcaattcatatgtttgagaaggactgatgtagtcctctactgcctctcctgctgctatgtgctgctctagtcacactgtcctcctggctatttcgataagatggaaactctcctgcctcagggcttttgcacctactgctccctctgtctaggataatcttccccagaaaactgcatgccagttgccttatttccttcaggtctttattgaagtcactttctcattaaacactttctggcccatcctgtctaaaactgcatccccaaacccttcctatcccttttctccacttttttctttttttaaactatagttcttatcaacatagtatatgttttgcttatttatcctgtttattgtctgactcaacaagtataatttgacaaagaaaaatgatacttctctttttttgctgttccaccaaatacaattcaaatgctttttgttttatttttttaccaattccaatttcaaaatgtctcaatggtgctataataaataaacttcaacactctttatgataacaacactgtgttatattctttgaatcctagcccatctgcagagcaatgactgtgctcaccagtaaaagataacctttctttctgaaatagtcaaatacgaaattagaaaagccctccctattttaactacctcaactggtcagaaacacagattgtattctatgagtcccagaagatgaaaaaaattttatacgttgataaaacttataaatttcattgattaatctcctggaagattggtttaaaaagaaaagtgtaatgcaagaatttaaagaaatatttttaaagccacaattattttaatattggatatcaactgcttgtaaaggtgctcctcctttttcttgtcattgctggtcaagattactaatatttgggaaggctttaaagacgcatgttatggtgctaatgtactttcacttttaaactctagatcagaattgttgacttgcattcagaacataaatgcacaaaatctgtacatgtctcccatcagaaagattcattggcatgccacaggggattctcctccttcatcctgtaaaggtcaacaataaaaaccaaattatggggctgcttttgtcacactagcatagagaatgtgttgaaatttaactttgtaagcttgtatgtggttgttgatcttttttttccttacagacacccataataaaatatcatattaaaaaaaaaaaaaaaaaaaaaaaaaaaaaaaaaaaaaaaaaaaaaaaaaaaaaaaaaaaaaaaaaaaaaaaaaaaaaaaaaaaaaaaaaaaaaaaaaaaaaaaaaaaaaaaaaaaaaaaaaaaaaaaaaaaaaa

SEQ ID NO: 37 - DNA, 2148 bp, Homo sapiens; identical to SEQ ID NO: 34

SEQ ID NO: 38 - DNA, 488 bp, Homo sapiens; identical to SEQ ID NO: 35

SEQ ID NO: 39 - DNA, 2566 bp, Homo sapiens; identical to SEQ ID NO: 36

SEQ ID NO: 40 - DNA, 581 bp, Homo sapiens
acaactgtgttcactagcaacctcaaacagacaccatggtgcacctgactcctgaggagaagtctgccgttactgccctgtggggcaaggtgaacgtggatgaagttggtggtgaggccctgggcaggctgctggtggtctacccttggacccagaggttctttgagtcctttggggatctgtccactcctgatgctgttatgggcaaccctaaggtgaaggctcatggcaagaaagtgctcggtgcctttagtgatggcctggctcacctggacaacctcaagggcacctttgccacactgagtgagctgcactgtgacaagctgcacgtggatcctgagaacttcaggctcctgggcaacgtgctggtctgtgtgccggcccatcactttggcaaagaattcacccaaccagtgcaggctgcctatcagaaagtggtggctggtgtggctaatgccctggcccacaagtatcactaagctcgctttcttgctgtccaatttctattaaaggttcctttgttccctaagtccaactactaaactgggggatattatgaagggccttgagcatctggattc

SEQ ID NO: 41 - DNA, 491 bp, Homo sapiens
cccacagactcagagagaacccaccatggtgctgtctcctgacgacaagaccaacgtcaaggccgcctggggtaaggtcggcgcgcacgctggcgagtatggtgcggaggccctggagaggatgttcctgtccttccccaccaccaagacctacttcccgcacttcgacctgagccacggctctgcccaggttaagggccacggcaagaaggtggccgacgcgctgaccaacgccgtggcgcacgtggacgacatgcccaacgcgctgtccgccctgagcgacctgcacgcgcacaagcttcgggtggacccggtcaacttcaagctcctaagccactgcctgctggtgaccctggccgcccacctccccgccgagttcacccctgcggtgcacgcctccctggacaagttcctggcttctgtgagcaccgtgctgacctccaaataccgttaagctggagcctcggtggccatgcttcttgcccctttgg

SEQ ID NO: 42 - DNA, 633 bp, Homo sapiens
actcttctggtccccacagactcagagagaacccaccatggtgctgtctcctgccgacaagaccaacgtcaaggccgcctggggtaaggtcggcgcgcacgctggcgagtatggtgcggaggccctggagaggatgttcctgtccttccccaccaccaagacctacttcccgcacttcgacctgagccacggctctgcccaggttaagggccacggcaagaaggtggccgacgcgctgaccaacgccgtggcgcacgtggacgacatgcccaacgcgctgtccgccctgagcgacctgcacgcgcacaagcttcgggtggacccggtcaacttcaagctcctaagccactgcctgctggtgaccctggccgcccacctccccgccgagttcacccctgcggtgcacgcctccctggacaagttcctggcttctgtgagcaccgtgctgacctccaaataccgttaagctggagcctcggtggccatgcttcttgccccttgggcctccccccagcccctcctccccttcctgcacccgtacccccgtggtctttgaataaagtctgagtgggcggcaaaaaaaaaaaaaaaaaaaaaaaaaacaaaaaaaaaaaaaaaaaaaaaaaaaaaaaa

SEQ ID NO: 43 - DNA, 782 bp, Homo sapiens
  modified_base (114)..(114): a, c, g, t, unknown, or other
  modified_base (712)..(712): a, c, g, t, unknown, or other
cttctgacctgcaggacagttttcctggagccatttggtatgaggtattaatttagcttaactaaattacaggggactcagaggccgtgctcctgaccgatccagacactattnctggctttttttttttttttttaacaatggtgtgcatgtgcaggaaatgacaaatttgtatgtcagattatacaaggatgtattcttaaaccgcatgactattcagatggctactgagttatcagtggccatttattagcatcatatttatttgtattttctcaacagatgttaaggtacaactgtgtttttctcgattatctaaaaaccatagtacttaaattgaacagttgcaaagatgtcttaattgtgtaaagaattggtgtagtcatgactttagctgatactcttatgtacgagatctgtctctgctgtttaacttcattggattaatcagctggtttcaactctactgcgaaacaaaaatagctccttaaaagtactgttctccttcagtggcatgtagttatctaatcaagacacctcattcaaacaaaacctgccttaggaaaatttaatatattttaaattattttaaaagaaatacaacatcttattctttagctttcttaatcggtgctttatggaggccagtgtaacgttacatgactcgttgagaaagttgaggaatttcctctaccacctttgttgcttgaangaaaaacatgtcttttcaaaatgagaggctttcattgaagaaaagaaaaaaacaacagttaaaagctaaa

SEQ ID NO: 44 - DNA, 756 bp, Homo sapiens
  modified_base (8)..(9): a, c, g, t, unknown, or other
  modified_base (11)..(11): a, c, g, t, unknown, or other
  modified_base (13)..(17): a, c, g, t, unknown, or other
  modified_base (326)..(326): a, c, g, t, unknown, or other
  modified_base (672)..(672): a, c, g, t, unknown, or other
  modified_base (678)..(678): a, c, g, t, unknown, or other
  modified_base (681)..(681): a, c, g, t, unknown, or other
  modified_base (685)..(685): a, c, g, t, unknown, or other
gcgccttnntntnnnnnttttttttttttttttttttaacttcctgcctatacacacgcagccatcagcccacaaagacatgactaccaacgcgggccccttgcacccatactggcctcagcacctaagactggacaactttgtacctaatgaccgccccacctggcatatactggctggcctcttctctgtcacaggggtcttagtcgtgaccacatggctgttgtcaggtcgtgctgcggttgtcccattggggacttggcggcgactgtccctgtgctggtttgcagtgtgtgggttcattcacctggtgatcgagggctggnttcgttctctactacgaagacctgcttggagaccaagccttcttatctcaactctggaaagagtatgccaagggagacagccgatacatcctgggtgacaacttcacagtgtgcatggaaaccatcacagcttgcctgtggggaccactcagcctgtgggtggtgatcgcctttctccgccagcatcccctccgcttcattctacagcttgtggtctctgtgggccagatctatggggatgtgctctacttcctgacagagcaccgcgacggattccagcacggagagctgggccaccctctctacttctggttttactttgtcttcatgaatgccctgtggctgntgctgnctngagnccttgtgcttgatgctgtgaagcacttactcatgcccaaacacgctgggatgccatggccccataagccaa

SEQ ID NO: 45 - DNA, 459 bp, Homo sapiens
  modified_base (12)..(13): a, c, g, t, unknown, or other
  modified_base (445)..(446): a, c, g, t, unknown, or other
  modified_base (448)..(453): a, c, g, t, unknown, or other
tttttttttttnntttttttttttttgtatgttggaacgtgccccagaatgaggcagttggcaaacttctcaggacaatgaatccttcccgtttttctttttatgccacacagtgcattgttttttctacctgcttgtcttatttttagaataatttagaaaaacaaaacaaaggctgtttttcctaattttggcatgaacccccccttgttccaaatgaagacggcatcacgaagcagctccaaaaggaaaagcttgggcggtgcccagcgtgcccgctgcccatcgacgtctgtcctggggacgtggagggtggcagcgtccccgcctgcaccagtgccgtcctgctgatgtggtaggctagcaatattttggttaaaatcatgtttgtgactgtaaccatttgtatgaattattttaaagaaataaaaatcctggaaagagnnannnnnnccagca

SEQ ID NO: 46 - DNA, 153 bp, Homo sapiens
  modified_base (2)..(5): a, c, g, t, unknown, or other
  modified_base (11)..(11): a, c, g, t, unknown, or other
  modified_base (137)..(138): a, c, g, t, unknown, or other
tnnnnggctgngagaagacgacagaaggggacagaggcaagaaaagatgttgatcaagaaagatgagaaccaggggtgagggctgaaggagaatcaaagataaaataccagtttaaaaaaaaaaaaaaaaaaaaaanngtcgtatcgaatcga

SEQ ID NO: 47 - DNA, 366 bp, Homo sapiens
  modified_base (19)..(19): a, c, g, t, unknown, or other
  modified_base (84)..(85): a, c, g, t, unknown, or other
  modified_base (89)..(89): a, c, g, t, unknown, or other
  modified_base (93)..(94): a, c, g, t, unknown, or other
  modified_base (96)..(101): a, c, g, t, unknown, or other
  modified_base (172)..(172): a, c, g, t, unknown, or other
  modified_base (191)..(191): a, c, g, t, unknown, or other
  modified_base (267)..(267): a, c, g, t, unknown, or other
  modified_base (278)..(278): a, c, g, t, unknown, or other
  modified_base (282)..(282): a, c, g, t, unknown, or other
  modified_base (285)..(285): a, c, g, t, unknown, or other
  modified_base (301)..(301): a, c, g, t, unknown, or other
  modified_base (328)..(328): a, c, g, t, unknown, or other
ttttttttttttttgccgnccactcagactttattcaaagaccaggaagggccggtgcaaggaggggaggagggcccgttgganngccnagcnngnnnnnngaacggctaccgaggctccagcttaacggtatttggaggtcagcacggtgctcacagaagccaggaacttntccagggaggcgtgcaccncaggggttgaactcggcggggaggtgggcggccagggtcaccagcaggcagtggcttaggagcttgaagttgaccngggtccacccnaagnttntgcgcgtgcaggtcgntcagggcggacagcgcgtttgggcatntcgtccacgtgcgccacggctttgggtcaagcgcgttc

SEQ ID NO: 48 - DNA, 556 bp, Homo sapiens
ttagtgatacttgtgggccagggcattagccacaccagccaccactttctgataggcagcctgcactggtggggtgaattctttgccaaagtgatgggccagcacacagaccagcacgttgcccaggagcctgaagttctcaggatccacgtgcagcttgtcacagtgcagctcactcagtgtggcaaaggtgcccttgaggttgtccaggtgagccaggccatcactaaaggcaccgagcactttcttgccatgagccttcaccttagggttgcccataacagcatcaggagtggacagatccccaaaggactcaaagaaccgagcactttcttgccatgagccttcaccttagggttgcccataacagcatcaggagtggacagatccccaaaggactcaaagaacctctgggtccaagggtagaccaccagcagcctgcccagggcctcaccaccaacttcatccacgttcaccttgccccacagggcagtaacggcagacttctcctcaggagtcaggtgcaccatggtgtctgtttgaggttgctagtgaa

SEQ ID NO: 49 - DNA, 534 bp, Homo sapiens
actcttctggtccccacagactcagagagaacccaccatggtgctgtctcctgccgacaagaccaacgtcaaggccgcctggggtaaggtcggcgcgcacgctggcgagtatggtgcggaggccctggagaggcacttcgacctgagccacggctctgcccaagttaagggccacggcaagaaggtggccgacgcgctgaccaacgccgtggcgcacgtggacgacatgcccaacgcgctgtccgccctgagcgacctgcacgcgcacaagcttcgggtggacccggtcaacttcaagctaagccactgcctgctggtgaccctggccgcccacctccccgccgagttcacccctgcggtgcacgcttccctggacaagttcctggcttctgtgagcaccgtgctgacctccaaataccgttaagctggagcctcggtagccgttcctcctgcccgctgggcctcccaacgggccctcctcccctccttgcaccggcccttcctggtctttgaataaagtctgagtgggcggca

SEQ ID NO: 50 - DNA, 713 bp, Homo sapiens
gaattcggcacgagccggagcgggcgtcatggcgcggctcctctggttgctccggggcctgaccctcggaactgcgcctcggcgggcggtgcggggccaagcgggcggcggcgggcccggcaccgggccgggactgggggaggcagggtctcttgcaacgtgtgagctgcctcttgccaagagtgagtggcaaaagaaactaaccccggagcagttctacgtcacaagagaaaagggaacggaaccgcctttcagtgggatctacctgaataacaaggaagcaggaatgtatcattgcgtgtgctgcgacagtccactcttcagttctgagaaaaagtactgctctggcactgggtggccttcgttttccgaggctcatggtacgtctggctctgatgaaagccacacagggatcctgagacgtctggatacctcgttaggatcagctcgcacagaggttgtctgcaagcagtgtgaagctcatctaggtcacgtgtttcctgatggacctgggcccaatggtcagaggttttgcatcaacagtgtggctttgaagttcaaaccaaggaaacactgaccatcttcaagagtcccgttcccttgccaccccttccacgtgcaccctcaatttcgcacaattcacttgaatgacttgttttatttgcaataaaactgggctgaatttgcaaaaaaaaaaaaaaaaaaaaaaaaaa

SEQ ID NO: 51 - DNA, 3405 bp, Homo sapiens
cgcccaacccaagttcaaaggctgataagagagaaaatctcatgaggaggttttagtctagggaaagtcattcagtggatgtgatcttggctcacaggggacgatgtcaagctcttcctggctccttctcagccttgttgctgtaactgctgctcagtccaccattgaggaacaggccaagacatttttggacaagtttaaccacgaagccgaagacctgttctatcaaagttcacttgcttcttggaattataacaccaatattactgaagagaatgtccaaaacatgaataatgctggggacaaatggtctgcctttttaaaggaacagtccacacttgcccaaatgtatccactacaagaaattcagaatctcacagtcaagcttcagctgcaggctcttcagcaaaatgggtcttcagtgctctcagaagacaagagcaaacggttgaacacaattctaaatacaatgagcaccatctacagtactggaaaagtttgtaacccagataatccacaagaatgcttattacttgaaccaggtttgaatgaaataatggcaaacagtttagactacaatgagaggctctgggcttgggaaagctggagatctgaggtcggcaagcagctgaggccattatatgaagagtatgtggtcttgaaaaatgagatggcaagagcaaatcattatgaggactatggggattattggagaggagactatgaagtaaatggggtagatggctatgactacagccgcggccagttgattgaagatgtggaacatacctttgaagagattaaaccattatatgaacatcttcatgcctatgtgagggcaaagttgatgaatgcctatccttcctatatcagtccaattggatgcctccctgctcatttgcttggtgatatgtggggtagattttggacaaatctgtactctttgacagttccctttggacagaaaccaaacatagatgttactgatgcaatggtggaccaggcctgggatgcacagagaatattcaaggaggccgagaagttctttgtatctgttggtcttcctaatatgactcaaggattctgggaaaattccatgctaacggacccaggaaatgttcagaaagcagtctgccatcccacagcttgggacctggggaagggcgacttcaggatccttatgtgcacaaaggtgacaatggacgacttcctgacagctcatcatgagatggggcatatccagtatgatatggcatatgctgcacaaccttttctgctaagaaatggagctaatgaaggattccatgaagctgttggggaaatcatgtcactttctgcagccacacctaagcatttaaaatccattggtcttctgtcacccgattttcaagaagacaatgaaacagaaataaacttcctgctcaaacaagcactcacgattgttgggactctgccatttacttacatgttagagaagtggaggtggatggtctttaaaggggaaattcccaaagaccagtggatgaaaaagtggtgggagatgaagcgagagatagttggggtggtggaacctgtgccccatgatgaaacatactgtgaccccgcatctctgttccatgtttctaatgattactcattcattcgatattacacaaggaccctttaccaattccagtttcaagaagcactttgtcaagcagctaaacatgaaggccctctgcacaaatgtgacatctcaaactctacagaagctggacagaaactgttcaatatgctgaggcttggaaaatcagaaccctggaccctagcattggaaaatgttgtaggagcaaagaacatgaatgtaaggccactgctcaactactttgagcccttatttacctggctgaaagaccagaacaagaattcttttgtgggatggagtaccgactggagtccatatgcagaccaaagcatcaaagtgaggataagcctaaaatcagctcttggagataaagcatatgaatggaacgacaatgaaatgtacctgttccgatcatctgttgcatatgctatgaggcagtactttttaaaagtaaaaaatcagatgattctttttggggaggaggatgtgcgagtggctaatttgaaaccaagaatctcctttaatttctttgtcactgcacctaaaaatgtgtctgatatcattcctagaactgaagttgaaaaggccatcaggatgtcccggagccgtatcaatgatgctttccgtctgaatgacaacagcctagagtttctggggatacagccaacacttggacctcctaaccagccccctgtttccatatggctgattgtttttggagttgtgatgggagtgatagtggttggcattgtcatcctgatcttcactgggatcagagatcggaagaagaaaaataaagcaagaagtggagaaaatccttatgcctccatcgatattagcaaaggagaaaataatccaggattccaaaacactgatgatgttcagacctccttttagaaaaatctatgtttttcctcttgaggtgattttgttgtatgtaaatgttaatttcatggtatagaaaatataagatgataaagatatcattaaatgtcaaaactatgactctgttcagaaaaaaaattgtccaaagacaacatggccaaggagagagcatcttcattgacattgctttcagtatttatttctgtctctggatttgacttctgttctgtttcttaataaggattttgtattagagtatattagggaaagtgtgtatttggtctcacaggctgttcagggataatctaaatgtaaatgtctgttgaatttctgaagttgaaaacaaggatatatcattggagcaagtgttggatcttgtatggaatatggatggatcacttgtaaggacagtgcctgggaactggtgtagctgcaaggattgagaatggcatgcattagctcactttcatttaatccattgtcaaggatgacatgctttcttcacagtaactcagttcaagtactatggtgatttgcctacagtgatgtttggaatcgatcatgctttcttcaaggtgacaggtctaaagagagaagaatccagggaacaggtagaggacattgctttttcacttccaaggtgcttgatcaacatctccctgacaacacaaaactagagccaggggcctccgtgaactcccagagcatgcctgatagaaactcatttctactgttctctaactgtggagtgaatggaaattccaactgtatgttcaccctctgaagtgggtacccagtctcttaaatcttttgtatttgctcacagtgtttgagcagtgctgagcacaaagcagacactcaataaatgctagatttacacactcaaaaaaaaaaaa

SEQ ID NO: 52 - DNA, 1244 bp, Homo sapiens
atggaagccccagctcagcttctcttcctcctgctactctggctcccagataccaccggagaaattgtgttgacacagtctccagccaccctgtctttgtctccaggggaaagagccaccctctcctgcagggccagtcagagtgttggcagctacttagcctggtaccaacagaaacctggccaggctcccaggcccctcatctatgatgcatccaacagggccactggcatcccagccaggttcagtggcagtgggtctgggacagacttcactctcaccatcagcagcctagagcctgaagattttgcagtttattactgtcaacaccgtgacaattggcctccgggggccactttcggcggagggaccaaggtggagatcaaacataccaccggagaaattgtgttgacacagtctccagccaccctgtctttgtctccaggggaaagagccaccctctcctgcagggccagtcagagtgttggcagctacttagcctggtaccaacagaaacctggccaggctcccaggcccctcatctatgatgcatccaacagggccactggcatcccagccaggttcagtggcagtgggtctgggacagacttcactctcaccatcagcagcctagagcctgaagattttgcagtttattactgtcaacaccgtgacaattggcctccgggggccactttcggcggagggaccaaggtggagatcaaacgaactgtggctgcaccatctgtcttcatcttcccgccatctgatgagcagttgaaatctggaactgcctctgttgtgtgcctgctgaataacttctatcccagagaggccaaagtacagtggaaggtggataacgccctccaatcgggtaactcccaggagagtgtcacagagcaggacagcaaggacagcacctacagcctcagcagcaccctgacgctgagcaaagcagactacgagaaacacaaagtctacgcctgcgaagtcacccatcagggcctgagctcgcccgtcacaaagagcttcaacaggggagagtgttagagggagaagtgcccccacctgctcctcagttccagcctgaccccctcccatcctttggcctctgaccctttttccacaggggacctacccctattgcggtcctccagctcatctttcacctcacccccctcctcctccttggctttaattatgctaatgttggaggagaatgaataaataaagtgaatctttgc

SEQ ID NO: 53 - DNA, 465 bp, Homo sapiens
  modified_base (5)..(5): a, c, g, t, unknown, or other
  modified_base (202)..(202): a, c, g, t, unknown, or other
ttttntatactaaccaggggtttaatataaatacaaccagcatagaaagacccaaaactatacagaaaccaaaaccagaatgccatgtggtggaggcaaagggcagaatttctgacccctttggctcagctgcccttccccacaaataaaaaccaacaaagaggacaaatcaggacaataaagaagattcatgctaagctgnggcagaggggggaaggtatgatcgggtgggggtgggacaaggaacggccatggaagatcactgggtcaggttggaccctgggctgggagcgggagggcaaggcccctcaccacaacttaacccaaacctaagctgcccccaggtgccataggtccctgtcccagcagggaggctgatgggcctgggcccatgcccctccccacctttgggggtcagaaaagtggccacccaggcctgctgggatggggcctgacacaggctct

SEQ ID NO: 54 - DNA, 1013 bp, Homo sapiens
atcattcctagaactgaagttgaaaaggccatcaggatgtcccggagccgtatcaatgatgctttccgtctgaatgacaacagcctagagtttctggggatacagccaacacttggacctcctaaccagccccctgtttccatatggctgattgtttttggagttgtgatgggagtgatagtggttggcattgtcatcctgatcttcactgggatcagagatcggaagaagaaaaataaagcaagaagtggagaaaatccttatgcctccatcgatattagcaaaggagaaaataatccaggattccaaaacactgatgatgttcagacctccttttagaaaaatctatgtttttcctcttgaggtgattttgttgtatgtaaatgttaatttcatggtatagaaaatataagatgataaagatatcattaaatgtcaaaactatgactctgttcagaaaaaaaattgtccaaagacaacatggccaaggagagagcatcttcattgacattgctttcagtatttatttctgtctctggatttgacttctgttctgtttcttaataaggattttgtattagagtatattagggaaagtgtgtatttggtctcacaggctgttcagggataatctaaatgtaaatgtctgttgaatttctgaagttgaaaacaaggatatatcattggagcaagtgttggatcttgtatggaatatggatggatcacttgtagaggacattgctttttcacttccaaggtgcttgatcaacatctccctgacaacacaaaactagagccaggggcctccgtgaactcccagagcatgcctgatagaaactcatttctactgttctctaactgtggagtgaatggaaattccaactgtatgttcaccctctgaagtgggtacccagtctcttaaatcttttgtatttgctcacagtgtttgagcagtgctgagcacaaagcagacactcaataaatgctagatttacacaaaaaaaaaaaaaaaa

SEQ ID NO: 55 - DNA, 2254 bp, Homo sapiens
  modified_base (268)..(269): a, c, g, t, unknown, or other
  modified_base (382)..(382): a, c, g, t, unknown, or other
  modified_base (873)..(873): a, c, g, t, unknown, or other
  modified_base (890)..(891): a, c, g, t, unknown, or other
  modified_base (1376)..(1376): a, c, g, t, unknown, or other
  modified_base (1383)..(1383): a, c, g, t, unknown, or other
  modified_base (1385)..(1386): a, c, g, t, unknown, or other
  modified_base (1388)..(1389): a, c, g, t, unknown, or other
  modified_base (1504)..(1504): a, c, g, t, unknown, or other
  modified_base (1766)..(1766): a, c, g, t, unknown, or other
  modified_base (1789)..(1789): a, c, g, t, unknown, or other
  modified_base (1794)..(1794): a, c, g, t, unknown, or other
  modified_base (1796)..(1796): a, c, g, t, unknown, or other
  modified_base (1798)..(1798): a, c, g, t, unknown, or other
  modified_base (1995)..(1995): a, c, g, t, unknown, or other
tttttttttataaaattaataaaaatattttattgaatttcaggaacttggtacttttttaaaacttcaaatctttgcacacaaatcaccactatactttctagaatagtggaagttaggacttcaagattgtcacttatctccttgtgtcacacagcacagaaaccccaagtcctcacactgcccccaccccccttctggccatgactaccaactactctgttattctagcggaggacaatgacggaagtgggtagacgactgaagnngatcagctgtccaccgcgtactctactaaagtgagaggaggagcaaccgaggatcatgccgcacacactctgagtgcaccacgtgacgtgggtcatacgggagttcccttttngttttctcgtttggttcagggcaaagctactgaaattgttcctagtccctgaggagctcagaagttgggcaaaggtcacagcagacttcctgaaaagcagacactgaggaacacagtggagagcgggagttcacagcgacgcagctgaggacgacgcaggacctctcccaaaggtgctgcagctccagcaccaggggccagggctgcggcgacagcagctcagcaacccttgctgtgctcaagttcttggggattcagagctaagttcaaaatttagaaacagtgccttaaagacgggcaagaaaacccggtgtgggagtctgctcatctatggtttgttactgctctcgcttcgatattcttaaattcctaggtaccaatgaaaaagccaagtgaacgtggcagagtgaggaggagacaggagcgtgtgcaccttccatctgtgagaggcacacttcagtctgggttcaagatgcagaatggtgcctacngcaaaaaaaaaaaaaannaccctcctcccttctttaccatttgaatggacattttccttacctgtgatcccaacagaaacagatccagacctatcatgtgaagtccacgttccaggatcagaagtaaccagtttatggactgagcttacacgggaaagtctacccccgactccttctggatagtaacatacacagctgcataaaaacgtctccaaggggacatacgatgcatttgcttggtgtcccagccaagctccccaccggcgacctcactgttccttagagctcgagagctcgtctcctatcaatcagagaaccccatcagctgtgaccaacagagctggagccctctgtggagggagctgaccccacacacaggacagagcagaatcctgattattttacaaactgcaaaccttctgagtaagaagacaaaaatatacattccaaggtatctgtaaagtgcttggaagatgcagacagctgcaccgaggggctctganccatccnanncnnctgcgctttgctgcggtcacacacacggtctcagtcacgtgatggttttgcttttatttcttaaacggctgagtgataatccagctagtgtgcagtcatttcatacctttcaatnggcgtcaccgcagtgacgctgccccagccccatgctgagggccgacacaattcacggaacagattcatcatatttggtctttatgtaaataataaatgttttaaaattgcctaaatataccattctgagccatttcatccctatttcatcccaccaggaaaatacaggttttttcctctctaaaaaaaaattaaataccaaaataactacatttaaataaataatgttatgatgatgacatttaaaagctcagccatcaggntgacgccctctccccatgtgcancggcncncngccctcggccggcacactcgggaagggccagcggttttcttcctgaggagccgggcgaggaggtgcagggacctcccactctcattccctcacccccgtcctgtcctcattttccgtagaggagtcagcctcaggattgggttcggttctgaaaggtcagggacatttcctaccacaaaacaggaaatgccccagangtgccctgcaggacgtggctcggaccctgctccaccatggcggccgctcaccgaaggtggggagtagacagcgggtcagaggcccggcctagagccggagggacaccccatatacaaacataccacggagagacctgggatctgagtttcaaaagggcctgtgataaaagactgaatcgttttccaaatgaagtagaaatggttctgtcgttttaacatacacaagacttaggagacttgttttactcagagtggaaaa

SEQ ID NO: 56 - DNA, 1973 bp, Homo sapiens
  modified_base (69)..(74): a, c, g, t, unknown, or other
  modified_base (326)..(326): a, c, g, t, unknown, or other
  modified_base (402)..(402): a, c, g, t, unknown, or other
  modified_base (411)..(411): a, c, g, t, unknown, or other
  modified_base (443)..(443): a, c, g, t, unknown, or other
  modified_base (470)..(470): a, c, g, t, unknown, or other
  modified_base (598)..(598): a, c, g, t, unknown, or other
  modified_base (600)..(600): a, c, g, t, unknown, or other
  modified_base (602)..(602): a, c, g, t, unknown, or other
  modified_base (605)..(605): a, c, g, t, unknown, or other
  modified_base (611)..(612): a, c, g, t, unknown, or other
  modified_base (620)..(623): a, c, g, t, unknown, or other
  modified_base (630)..(630): a, c, g, t, unknown, or other
  modified_base (634)..(635): a, c, g, t, unknown, or other
  modified_base (639)..(641): a, c, g, t, unknown, or other
  modified_base (644)..(644): a, c, g, t, unknown, or other
  modified_base (650)..(650): a, c, g, t, unknown, or other
  modified_base (654)..(654): a, c, g, t, unknown, or other
  modified_base (666)..(666): a, c, g, t, unknown, or other
  modified_base (675)..(675): a, c, g, t, unknown, or other
  modified_base (678)..(678): a, c, g, t, unknown, or other
  modified_base (681)..(681): a, c, g, t, unknown, or other
ttttttttttgtttttttttttttttttttttttttttttttttttttttttttttttttttttttttnnnnnntgcaaagattcactttatttattcattctcctccaacattagcataattaaagccaaggaggaggaggggggtgaggtgaaagatgagctggaggaccgcaataggggtaggtcccctgtggaaaaagggtcagaggccaaaggatgggagggggtcaggctggaactgaggagcaggtgggggcacttctccctctaacactctcccctgttgaagctctttgtgacgggcgagctcaggccctgatgggntgacttcgcaggcgtagactttgtgtttctcgtagtctgctttgctcagcgtcagggtgctgctgaggctgtaggntgctgtccnttgctgtcctgctctgtgacactctcctgggnagttacccgattggagggcgttatccnaccttccactgtactttggcctctctgggatagaagttattcagcaggcacacaacagaggcagttccagatttcaactgctcatcagatggcgggaagatgaagacagatggtgcagccacagttcntntnatntccacnntggtcccnnnnccgaaantganngggnnnatnatcatnctgntgacagtaatangttgcaaantcntcnggctgcaggctgctgatggtgaaactgaaatgtgtcccagacccacttccactgaaccttaatgggacccctgtttccaaattggatgcatcgtagatgaggagcttaggggctctcccaggtttttgttgataccaatttaaataattattaatggcctgactcgcctggcaggtgatggtgactctgtgtgctcagaataaatattaaataaaacaaagtttttttaaaaaggagtttgcattcagtggactgtcatgcttttggtaactttttttaattactgggataaaactgcacattaagacatattcctaaaaataccagcaaatgcagaaatatacaaattgtgcttaattagcgtacagagtaatgcaacaagtcaatgcaataaatagctcagaacacctaaaaacataaacatttaaaacaatttaatgtaatcaagacaaaatccaaaatttcaatgtattttttatagttaacaactgttttgccttttcagaggtctatgaaagtgacctttcttggaagtcatgaaattggatattttccctcatgcatagtcacccaaaaaaatctgcctggaatcaagagaaatcatgccagaaactcagttaacttaaaggtaatctgatatgtggccttgtctatttcttctaggctataatttctctggggaaagagtgtgacttttagtgtccttaccagggaaaacggtaagcgttttcttccctctagtgatacagcaagatgagtgaaagtggaagatgtcggaaggtgaataggcaagtaatgcttgcaatacattttgatgttcctacagaggtctaaaaacttttggtacctctgtacttctggctgtaacctctaagcttattccattataaacttcaggccccagcttcattctgaggtgattgcgccattgagatcactggtttgttttcttcaactcactcgaaactttactggtatttgttacttcactggtattcacgccagtttaaacattctcttctacagtcaaggtattgtttttaaaggactgttttgtacaaagatttccctgaggctaagtaacctttacatactaaattcttcaaagaaagaaaagaaaacttttccctaaatatgaactctgatgttctgaagttacggtgattttagatcattttttccgatcattatgacatcagagcaaccttatgcaggcttttctgtaaagactcaaagcatggactttagcaataaataatacttcacattgtacactgcaccatcatttaaaa

SEQ ID NO: 57 - DNA, 1304 bp, Homo sapiens
  modified_base (40)..(42): a, c, g, t, unknown, or other
  modified_base (866)..(866): a, c, g, t, unknown, or other
  modified_base (868)..(868): a, c, g, t, unknown, or other
  modified_base (870)..(872): a, c, g, t, unknown, or other
  modified_base (874)..(875): a, c, g, t, unknown, or other
  modified_base (877)..(878): a, c, g, t, unknown, or other
  modified_base (882)..(884): a, c, g, t, unknown, or other
  modified_base (1164)..(1165): a, c, g, t, unknown, or other
tttttttttttttttttttttttttttttttttttttttnnntaataaatatgagcatttatttggcacccgatggcaatacaaaatcctggcagtgggagtggaaaggttctctctctcaaatacttccatactatgtcgacccaaaggcaggacttggcagcaaggctcacaaaccacccaaacaaatatttattgagcaccttgactactacaggcctagcattttgctagggaccatgggagatgtgaaggaagttatctcacacatgatatgtcttcaaggagctaaaaatgccagtggataaaagcaaaacacatggaaaaacaaagtacaaataataatccgtgtatattgtcaaaaggaacattttatcaaaaggtaggattgtagctaaggttggcttgccttcttccctcttttattcaacaaacatttaatgaaggcccactatgtgccaagcacttggtacatgatggtgaataaaacaaacaaggtttctgccctcatttacagcctggtaggggagacagaaatgaacaagtaaaagtagcatatatataaactgcaataaatgcaatgaggggaaaagacaagatgtggtgacagacacagaagtagactgctcagggactgaagggcccgggaattgtcaagacttgaggaagaaggacaccacctgagtcaagagtggtgggggtggagagctgagaaggcccaggaaaagggcaggaaagagcacaaaattagaagctgagaggagaccactcgggctggagcttagcaagaaatcaccatttaatgaggttcaaggggaaggcaagaaccagttctcataaaccaaggtgaagagtttacattttanangnnngnnannagannncagaagggttctaagcaggggggtgatcagatttatatttaaacaaccaaatcctggccaggtgtggtggctcatgcctgtaagcccagctatttgagaggctgaggcgggaagatggcttgaggccaggagttcgagaccagtctgagaaacatagtgagaactcaccttaaaaaacaaaaaacagcaaacaaccaaaaaaaattaaaaaccaaaactactctgttatgtgagaacagactggaggaagaaagaatggaagtttttttttttttttttnnaaaaaaaggtcttgcccgggcgcagtggctcacgcctgtaatcccaacactttgggaggctgaggtgggtggatcatgaggtcaggagatcaagaccatcccggctaacatggtgaaaccctgtctctactaaaaatac

SEQ ID NO: 58 - DNA, 1017 bp, Homo sapiens
  modified_base (234)..(234): a, c, g, t, unknown, or other
  modified_base (238)..(238): a, c, g, t, unknown, or other
  modified_base (243)..(243): a, c, g, t, unknown, or other
  modified_base (301)..(301): a, c, g, t, unknown, or other
  modified_base (387)..(387): a, c, g, t, unknown, or other
  modified_base (406)..(408): a, c, g, t, unknown, or other
  modified_base (1001)..(1001): a, c, g, t, unknown, or other
cagggatgtacttcttatcacatttctatgaagaaatgggaagatcgggatatgaaaaagaaaatgttctatccccaaataaaagcagagcatggttaatgggacctgaatgcacatttatagcataaaagaatgtcaattctatttcataaaggaaaaatctcaactctttgtgactgagtttcacattaactggaactttatttgcttaaaacctaaacattgtcagtttgnaaanaaatnccactgtgacctgtagactgatcttgttgattaaattctagggttttttttttttttnggattcttggtaaaattttatccaaaaaacaggatacatatatatttagagaaggaaatatgaaatcaagagttttggcagccccntgctttttttttttttttnnnagctccctaaagactgtagcaggataaaaggatcactggctccgagtctctttgagataacaagtgatgaaataaaaaagaaagcccataccctcaaataaggtcaggtaaccccattgcccaccctccctacaaggtaaaaaatgagtacttttagtaacagttcagaattcatctttatctcctacctgcctcatcggtggaagtttaaagtcatgattttttttagacattgatacttgtgtctatagacaaataaactcatattagatgacaattgattttttaaaagtccaggtagagaaaggagcaatcattttgaactaaaatctttctatgttttttgattactattcaacttgctattttttagcaaaaagcgaagtttcaatagtgttcatctcaaatcttattgctttacaaccgtggtacacctttcattaaaaataaaaagatgaagcagtcaatccagtgattaatttgacatggctttcattgggaaaggggagggctggcaaagagaccaatagacaaaaaggtaacttaaacacttacacatacaatggtttgctttaaaaaaaaaaaaaaaaaangagagagagagagaaa

SEQ ID NO: 59 - DNA, 1528 bp, Homo sapiens
  modified_base (1490)..(1495): a, c, g, t, unknown, or other
  modified_base (1497)..(1498): a, c, g, t, unknown, or other
  modified_base (1500)..(1500): a, c, g, t, unknown, or other
tttggtggtggtggttttgttttgttttggagacggagtctcactcttgtcgcccaggctggagtgcaggcttggctcactgcaacctccacctcccgggttcaagcaattctcctgcctcagcctcctgagtagctgggattacaggcacccgccaccaccccccgctaattttttgtatttttatttttattttatttttttatttttttttgagacagagtgtcgctctgttgcccaggctggagtgtagtggtgcgatctcggctcactgcaagctccgcctcctgggttcgcgccattctcctgcctcagcctcctgagtagctggggctacaggtacccgccaccgcgcccagctaatttttttttttttgtatttttagtaaagacggggtttcacggtgttagccaggatggtctcaatctcctgacctcgtgatccgcccgccttggcctcccaaagtgctgggatcacaggcgtgagccaccgcgcccggcctattttttgtatttttagtagagactgggtttcatcatgttggtcgggctggtctccaactcctgacctcaggtgatccacctgccccgccccccaaagtgctagtgttacaagtgcgagccaccgtgtccggccgattctgaacagttttaataccattgctatttttgtgtttttcctgggcctttttttttttttttttttttttgagacagtctcgctctgttgcccaggctagagtgcaatggtgcaatctcagctcactgcaacctccaccccccacccccacaccccgttcaagtaattctcctgcctcagcctcccaaatagctgggattacaggtgtccgccaccacacccagctaatttttgttatttttagtagagatggggtttcactgtgttggtcaggctggtctccaactgttgccctcaggtgagccactgtgccccaccttttcctgggtttcataaggatctgaagtggtggattccttgtttttgctagtatctcatttagagttgagatggaccttaaaactcatctgttttaactcactttttaatagatgagttaaacttaatttacttaaggatgtacagttagagcctggaacttcaaccattattcactccccatgccctgtttccccccacttcgaaattaaatgcggttagcatcatatagttcattttccccctccatgctgctgtgtgattcttgactttgggtatgagtttttcatccttcatgcagggttctgtcagttcatggtatagtgattcagtgttaaaatggtggtgtctcagctgtgctgtgcacattccaaccttgtcaaattaatagtcctgagcaagcaagaaaaagaggtaataacatacccatttctttatgaatataagcttataatattttttcatgtgctatttttactgagcaaattgtatgtctcacatgttaacacaataaatatcttgacaattttannnnnnannanaaaaaaaaaaaaaaaaaaaaaaaaacaa

SEQ ID NO: 60 - DNA, 713 bp, Homo sapiens
  modified_base (27)..(30): a, c, g, t, unknown, or other
  modified_base (32)..(32): a, c, g, t, unknown, or other
  modified_base (34)..(37): a, c, g, t, unknown, or other
  modified_base (39)..(39): a, c, g, t, unknown, or other
  modified_base (148)..(148): a, c, g, t, unknown, or other
  modified_base (526)..(526): a, c, g, t, unknown, or other
  modified_base (532)..(532): a, c, g, t, unknown, or other
  modified_base (539)..(539): a, c, g, t, unknown, or other
  modified_base (542)..(542): a, c, g, t, unknown, or other
  modified_base (545)..(545): a, c, g, t, unknown, or other
  modified_base (557)..(557): a, c, g, t, unknown, or other
  modified_base (559)..(559): a, c, g, t, unknown, or other
  modified_base (596)..(596): a, c, g, t, unknown, or other
  modified_base (603)..(604): a, c, g, t, unknown, or other
  modified_base (616)..(616): a, c, g, t, unknown, or other
  modified_base (621)..(621): a, c, g, t, unknown, or other
  modified_base (629)..(629): a, c, g, t, unknown, or other
tggcacgaggctggaagaattcgcggnnnntntnnnntntttttttttttttttttctgctaccgtgactaagatggaagcgtttttggggtcgcggtccggactttgggcggggggtccggccccaggacagttttaccgcattccntccactcccgattccttcatggatccggcgtctgcactttacagaggtccaatcacgcggacccagaaccccatggtgaccgggacctcagtcctcggcgttaagttcgagggcggagtggtgattgccgcagacatgctgggatcctacggctccttggctcgtttccgcaacatctctcgcattatgcgagtcaacaacagtaccatgctgggtgcctctggcgactacgctgatttccagtatttgaagcaagttctcggccagatggtgattgatgaggagcttctgggagatggacacagctatagtcctagagctattcattcatggctgaccagggccatgtacagccggcgctcgaagatgaaccctttngtgganacaccanggncantcggaggctatncntgatggagagagcttcctcggttatgtggacatgctnggtgtannctatgaagcccnttcgntggccacnggttatggtgcatacttggtcagcctctgctgcgaaaagttcgggaaaagcagccagtgctaagccagaccgaggccggattag

SEQ ID NO: 61 - DNA, 809 bp, Homo sapiens
  modified_base (54)..(59): a, c, g, t, unknown, or other
  modified_base (468)..(468): a, c, g, t, unknown, or other
  modified_base (526)..(526): a, c, g, t, unknown, or other
  modified_base (537)..(537): a, c, g, t, unknown, or other
  modified_base (688)..(689): a, c, g, t, unknown, or other
  modified_base (691)..(693): a, c, g, t, unknown, or other
  modified_base (724)..(724): a, c, g, t, unknown, or other
  modified_base (730)..(730): a, c, g, t, unknown, or other
  modified_base (734)..(734): a, c, g, t, unknown, or other
  modified_base (741)..(741): a, c, g, t, unknown, or other
  modified_base (767)..(767): a, c, g, t, unknown, or other
  modified_base (770)..(770): a, c, g, t, unknown, or other
  modified_base (775)..(775): a, c, g, t, unknown, or other
  modified_base (780)..(780): a, c, g, t, unknown, or other
gcgttcggacccctgtcggatagtaaatcccaggtaaggtacctgcggtcggcnnnnnngctgcgttcggacccctgtcggatagtaaatcccagtaaggtacctgccgtgggcagatctgagctttcttcttggacaccccatacccacagtcctccaggccacccttaagtacaatgttctcctacctaagaaggcatctggattttctctttccttggaaatagtaaagaactactctttgactgtttttgacctcacagtgaacctcaaatacactggaattcgcaataaatccagtatggtggttatagatgtaaaaatgctatcaggatttactccaaccatgtcatccattgaagagcttgaaaacaagggccaagtgatgaagactgaagtcaagaatgaccatgttcttttctacttggaaaatgtttttggtcgagcagacagtttcactttttctgntgagcagagcaaccttgtgttcaacattcagccagccccaggcatggtctacgattantacgaaaaagntggagaagcatttcttttaacaaactgattcttctgtatcaaacctggaaaaaaatcatgaaccatctgacatcgtgaacagtctgcagtgggctatggtttcttgacaagtcttatttccttatcatcccattaaatgttgtcattttgnnannnaaaaaaaaaaaaaaaaaaaaaaaaaaaaaanaaaaanaaanaaaaaanaaaaaaaaaaaaaaaaaaaaaaacanaanaaaanaaaanaaaaaaaaaaaaaaaacaaaaaaaaaaaa

SEQ ID NO: 62 - DNA, 621 bp, Homo sapiens
  modified_base (439)..(439): a, c, g, t, unknown, or other
  modified_base (562)..(562): a, c, g, t, unknown, or other
gttttttttttttttttttttttttggttaccttctcattcatgtcaagtatgtggttcattcttagaaccaagggaaatactgctccccccatttgctgacgtagtgctctcatgggctcacctgggcccaaggcacagccagggcacagttaggcctggatgtttgcctggtccgtgagatgccgcgggtcctgtttccttactggggatttcagggctgggggttcagggagcatttccttttcctgggagttatgaccgcgaagttgtcatgtgccgtgcccttttctgtttctgtgtatcctattgctggtgactctgtgtgaactggcctttgggaaagatcagagagggcagaggtggcacaggacagtaaaggagatgctgtgctggccttcagcctggacagggtctctgctgactgccaggggcggggngctctgcatagccaggatgacggctttcatgtcccagagacctgttgtgctgtgtattttgatttcctgtgtatgcaaatgtgtgtatttaccattgtgtagggggctgtgtctgatcttggngttcaaaacagaactgtatttttgcctttaaaattaaataatataacgtgaataaatga

SEQ ID NO: 63 - DNA, 829 bp, Homo sapiens
  modified_base (62)..(64): a, c, g, t, unknown, or other
  modified_base (575)..(575): a, c, g, t, unknown, or other
  modified_base (638)..(638): a, c, g, t, unknown, or other
  modified_base (659)..(659): a, c, g, t, unknown, or other
  modified_base (693)..(693): a, c, g, t, unknown, or other
  modified_base (775)..(775): a, c, g, t, unknown, or other
  modified_base (823)..(823): a, c, g, t, unknown, or other
ttttttttttttttttttttttttttttggtgggggagttgaaacctaattttgtggcgtannngctatgcagcttgaaatccaagtagcactaaattttattatttcgtatttgtacaataagcttcccaggagacgtgtcaacatttttggtgaagaacttgaaagacttcttaagaagaaatatgaagggcactggtatcctgaaaagccatacaaaggatcggggtttagatgtatacacataggggagaaagtggacccagtgattgaacaagcatccaaagagagtggtttggacattgatgatgttcgtggcaatctgccacaggatcttagtgtttggatcgacccatttgaggtttcttaccaaattggtgaaaagggaccagtgaaggtgctttacgtggatgataataatgaaaatggatgtgagttggataaggagatcaaaaacagctttaacccagaggcccaggtttttatgcccataagtgacccagcctcatcagtgtccagctctccatcgcctccttttggtcactctgctgctgtaagccctaccttcatgcccnggtccactcagcctttaacctttaccactgccacttttgctgccaccaagttcggctctaccnaaatgaagaatagtggccgtnagcaacaaggttgcacgtacttctcccatcaacntcggcttgaatgtgaatgacctcttgaagcagaaagccatctcttcctcaatgcactctctgtatgggcttggcttgggtanccagcagcagccacagcaacagcagcagccagcccagccgccaccgcnaccacg

SEQ ID NO: 64 - DNA, 878 bp, Homo sapiens
  modified_base (26)..(26): a, c, g, t, unknown, or other
  modified_base (28)..(28): a, c, g, t, unknown, or other
  modified_base (39)..(39): a, c, g, t, unknown, or other
  modified_base (560)..(560): a, c, g, t, unknown, or other
  modified_base (565)..(565): a, c, g, t, unknown, or other
  modified_base (633)..(633): a, c, g, t, unknown, or other
tttcgagcggccgcccgggcaggtantnttttttttttntttttttttttttttgctgctccaacgaccagcatgtgttggagcagatctccatggtaagccaaaagtggacttgtcagcctataactactctgcagctgccactaactctacaggcacagtaactacactttatacaggagcacatgccaaagtgcctgggaggtgccaataaaatcaagaaataagaaaactacaaaaaaagatacggtattaaccttggacataattttttttagggaggcagctttcccacttttataaagggggttgtaaatctcaagaggtcatttgttccccatagcagcatatctcatttttaaattgaagcgaattaaataggattttactactcaacattcattatactgttaatctttgctgaaatatatgctaacaaatgttaagcaagggaaactgaagacttagtcatgtggattgttagcagtgatctgcattctgtaaaagaggtactttcccatgatgtaggcatgaagtggtgccagtaagcgtagagcggnaaatnttgactttagttaacattgggtttagcatttccagtgcagcattatcagtgggcctttaaaaatactncgtaagtacattagctttcactttgttgttaaattatagcagactcattatagagaacaagtttgccttgattttgtttaaaatgacttctgctaagcacccagaagataaaattgacatatttttataatataagcatactttttttgtacattgtgttcattcttgaataaaatgagttctgtgttggcttgtagatactaaaaagaaagtattgattttgattcaataaatgttttctttca

SEQ ID NO: 65 - DNA, 751 bp, Homo sapiens
  modified_base (3)..(6): a, c, g, t, unknown, or other
  modified_base (738)..(738): a, c, g, t, unknown, or other
cannnntaaatatgtttaaagaatattataattatatgacttagattgtaaaacaatatgtacagcagtgtcctattttttagaataaaattataaatatgtgctcacatatgtgtttgtgcatgcatagaaaacagattagaaaggaatatattctaacaccattatctctagctggtagaattatggaaaatttttatttccttctttttgcttctaaattttatataatgagcatatttggctttgtataatcatttttaaaaagttgttttagaagaatagtactgatatatcattcccttttagcagttttctctaggataaaaaataagaggaagtctgagcttaactaattaaaaaaacagatttctttaaaaaatattagcaaatcattagtgttcttactggagaaagggcagtgttcaaagaagaattaaacaaatcattccagttgcaggaaaaattcaatttactgcatgcagactgtttcttgactgaaaagttaattcctttcattcagaatcagtatgcatattcactggctatatttcatctcacatctgcaaacttaatttttcctttcttggtcatcagaagattaggaaataaattttagtccaggcaatagatcctacttggcaagctcaaaataactcaattattaaaaagcagcacacaaagaccagtagtgacttccaaaggattgttaacaatacttaaaaaaaaaaaaaaaanaaaaagaaaaaag

SEQ ID NO: 66 - DNA, 572 bp, Homo sapiens
tttttttttttttgcacttctgaggctagatatgtctggctgaagatttgatgtggttcctccttaagctatgcgtcctgttaataataggtactgtactgggctctgtgtaagtgtcgttggggtaggacctatattttaatactgttcctaacatttcattttactagcgagaaatctttgatttcattttattctttgtaattctagacactagattgtagtttagccataactgatgttttttaaaaagggatatattttcttgcacagttgttcaaaaaagagacaagtttcagtcctcaatgctgtcctttgttttacaggtacaagttttctagctcagacaaactatgaaaaactgtagactattctcaaggtattaactcgcagaccctctgggggtaggggctgttttctaagttacaggcagagtgggactgagatggtacagtgtgcacagacaggtactgagctgacagactgggattttctgtactaaaatgttactttgtatcaaaagttaaacaggctttagtacaacaaataaaggtcaatttctgtaaaaaaaa

SEQ ID NO: 67 - DNA, 793 bp, Homo sapiens
  modified_base (618)..(618): a, c, g, t, unknown, or other
  modified_base (632)..(632): a, c, g, t, unknown, or other
  modified_base (661)..(661): a, c, g, t, unknown, or other
  modified_base (678)..(678): a, c, g, t, unknown, or other
ttttaattttgaagctacctgaggtttagaattccttcagccctagctgcttttattctgctttttatttaaacaaaaagagggggaggatctgaaggaaactagttttctgtacaaaggctttgaggtccatggactatacttgtcccatttatcatcccaggtggtgctttgaccctgccataccctggctattaagataaaaagatttgtggacattaaaattatgaatatgtcagtaataatccagcacacattgaaatattgacacagattaccataatttgtgcaacatcttataaacaatgtcatttccatagtagtctaaggcttcaccagcctggcccactgtatctagactttaggttcattttaataattatgctttccttctctgtatcatttgggaagttgataaatatcacttccttagataccttcattcagtgatatatctggcttttacaattaaattggaaaaggtaagtttctctttggtgggttgagagttggaccatcaattctaatctacaaaaggaaattcatgatttcactctgacgcctaggatctagccaaggctggtctgcagtatcagatgtccaaactcatctactatnagccatattttgtnagtcgtttgtctaaactttgtcaaaaatncctttgccatgattttnttgctatctggatttcaaacatggacagttaggaagatgtgcattgaagtaggaaaattttgttcagatttgctgttatttattttttaaattaaaaatggaaatgtattttaaa

SEQ ID NO: 68 - DNA, 1150 bp, Homo sapiens
ctagtctcgagttttttttttttttttttctgtctctgtgtttgaagtttcagtttctgttttctaggtaaggcttatttttgattagcagtcaatggcaaagaaaaagtaaatcaaagatgacttcttttcaaaatgtattgtttagcacttaactcagatgaatttataaattattaatcttgatactaaggatttgttacttttttgcatattaggttaatttttaccttacatgtgagagtcttaccactaagccattctgtctctgtactgttgggaagttttggaaacccctgccagtgatctggtgatgatctgatgatttatttaaagagccgttgatgcctccaggaaacttaagtattttattaatatatatataggaatttttttttattttgctttgtctttctctcccttcttttatcctcatgttcattcttcaaaccagtgttttggaagtatgcatgcaggcctataaatgaaaaacacaattctttatgtgtatagcatgtgtattaatgtctaactacatacgcaaaaacttcctttacagaggttcggactaacatttcacatgcacatttcaaaacaagatgtgtcatgaaaacagcccctttacctgccaagacaagcagggctatatttcagtgacagctgatatttgttttgaaagtgaatctcataatatatatatgtattacacattattatgactagaagtatgtaagaaatgatcagaacaaaagaaaatttctattttcatgcaaatatttttcatcagtcatcactctcaaatataaattaaaatataacactcctgaatgcctgaggcacgatctggattttaaatgtgtggtattcattgaaaagaagctctccacccacttggtatttcaagaaaatttaaaacgatcccaaggaaagatgatgtgtatgttaaagtgactgcacaagtaaaagttcaatgttgtgtgcatgaaaaggattccttggttatgtgcagggaatcatctcacatgctgtttttcctatttggtttgagaaacaggctgacactattctctttgattagaaaataaactcataaaactcataatgttgatataatcaagatgtaaccactataaatatgtagaagaggaag

SEQ ID NO: 69 - DNA, 734 bp, Homo sapiens
  modified_base (93)..(93): a, c, g, t, unknown, or other
  modified_base (95)..(95): a, c, g, t, unknown, or other
  modified_base (554)..(554): a, c, g, t, unknown, or other
  modified_base (559)..(559): a, c, g, t, unknown, or other
  modified_base (646)..(646): a, c, g, t, unknown, or other
gatgtttaataccttctgaaacaggagggtaagatcagatgggaagcccctctgttgaaggatcttgggaaccttggtggttttttttttttngnttttttttttttgatcgagctgtggacatccttcttaattcgattctgaggatttgtttaactaaaaagttcccaaacacagaaagggcctccccacctgctttggggagctgtctgtgctgggagtgccaggcatcccatgggacccatcactgccagtgtctgtgcctcccagaggtcagccgtgtctgccctggctctgtctcctctgtgacagggcagagcatttctggtcagtttctccatggtgcctcccacccctttgtaaagtggatggacatgatggaattcagttgtctcaccctgatagcctgggtgttgatattcactttacccgcactcagacacaggcgaccttgaagcagttctcggtgtgtagagtccacgtgacagtccccacagcctccccagatagctgtgtgcctgtgcgctactgctgtgccattttcccaacttggncgttncactaaatgcagctgatctctctctctgtgcactcgtgatccatgttgaacaatacatgtaggttctttttccacgcaatgtaagancatgatatactgtacgttggaaagcatttaccttatttatatacctgaatgttcctactacacaaataaacatatattaaattctaaa

SEQ ID NO: 70 - DNA, 483 bp, Homo sapiens
  modified_base (427)..(427): a, c, g, t, unknown, or other
  modified_base (429)..(429): a, c, g, t, unknown, or other
  modified_base (431)..(434): a, c, g, t, unknown, or other
  modified_base (436)..(437): a, c, g, t, unknown, or other
  modified_base (439)..(441): a, c, g, t, unknown, or other
  modified_base (443)..(445): a, c, g, t, unknown, or other
  modified_base (448)..(449): a, c, g, t, unknown, or other
ttttttttttttaaagcctttatcggtatgaaaggttgaatgctctaggtttgagcactgctttctcggcttgctcttctggtgcagtataggcacacctagagggccacgtcagtctttgcgatcaccaaatctggttctgagaaataggcactggcaatttacacatgccttgctgtgtaatctcactatatttgctcaggcaaagtgggagaagcagccttaggttttcattctagagatgccggctttcccacctgatcggcttagagttcacgattgactgttttgggcttcatttcaccctctacataacaagcgggtggactagatgccttagcaagggtccgtgttgtgtggtgtctccagccacgcactcagctcaatcttagcacagttaaaaaatgcctttctagcaagttatctncncnnnncnngnnnannntcnnttcttgtgttcaataaaaagcctcctaatttaat

SEQ ID NO: 71 - DNA, 489 bp, Homo sapiens
cccccccccccctttttttttttttttttacattttaggacactgtgaggggaaaggacaattttgaaattccttttcaaggaaaaaaaaggtctttatgctttgccatgaggccacattcagctgctatttaaacttaatatcttgaacctaaagaatgctgacttttcctacatttccagagttaggcagtattctacacttaaagactactactatttttataaaaggtaatctattcaaatttcttcacagatttcaagtctctcaaacatcaagacaacttcagcagtcggtacaagtcacatttcattttgattgaatacatgatcttgaacagctcctgtacttgctctttgtaaaaaaaaataaaattattttgaattattctacctttgtaaacaattggctaaaagaatcatctttaagaaattaagccatttacatgtttgtgtttttctatagcagagcattatattttgcattata

SEQ ID NO: 72 - DNA, 548 bp, Homo sapiens
  modified_base (1)..(1): a, c, g, t, unknown, or other
  modified_base (146)..(146): a, c, g, t, unknown, or other
ntttttttacaaaaggaaaaaatattttgtttgaaaatctttgctacatgtcattatttttgccactgtaaagcttagcacagatgccagcaatacagaaatggccaacaagaaaacaaaacagtcaaaaataaaaccctgaaggnaaaagcaaaaacaaaacccccagagcatcttctcgctatcctccccttccccaaaagccctataataactgtacaatattatagtcctgatcacatttaaaaagtcgattattaaaaaacaagggttccattggaaactcaactttttggtttcgtaaattgtgatataaatatatatgtatactgtaagtgtgcacatagaataaaaaaataaactgtctccttttttactccactacctggcaccagactggagacataaggaagggaaactcagcaaatggacattcctttggcctcttcaaggccacccttgctcctcagtcccctatgactacatttaatatatcttctcattaattcagtcttgcactttagctactggccaaagccaatttaaaa

SEQ ID NO: 73 - DNA, 871 bp, Homo sapiens
  modified_base (33)..(33): a, c, g, t, unknown, or other
  modified_base (47)..(47): a, c, g, t, unknown, or other
  modified_base (49)..(49): a, c, g, t, unknown, or other
  modified_base (83)..(83): a, c, g, t, unknown, or other
  modified_base (124)..(124): a, c, g, t, unknown, or other
  modified_base (129)..(129): a, c, g, t, unknown, or other
  modified_base (856)..(857): a, c, g, t, unknown, or other
  modified_base (859)..(860): a, c, g, t, unknown, or other
ggcacgaggttttttttaattacatgtaattgnttatttaaaataantntccaagtcttccaatgatttaacaggctttgctncacttttatcatctcaaacagctataaatcaacacactttntgtantttattttactactatgtatgctattttaataacatttttctttattaatactagaaccaaatatattgaccaataagcagtatagatttaaattatcttcttgggttggtctgaggttgctgatggattcttgggattgatctgatgctagaagctatcttaggccctgtctctaactcactgtatgtttcaggcaaaacatgccacggttctaggtctgttttctcatctgcaaaataaacacccaaattagatgatacttattgttttaactagctataaaattccaatactatattccccatcattttcacttacttttacttaatctttatttgctacttttccacctataaagcgtaattttccatatcaagtaaacataaattcattaaaaaataaacacaaacccaaaatattcttattctaatatatctgcattaatagataaaaaggctttagctttaattttcatttttcatttctacctcttaaagtcaatgataaactcacaagtgtaaaatgaatgcatttaaaaacataaaagatacatttcaatgacaagaaatatgcaatgatcatgaaaatctactgtacactttgccacggtcaaagaatgaaggacaatatggaaaagccaatcttcaaatatatccttaacaaaaactctctcctgcatagtaaaagcatcatctaaacagcagctccaaccaaaaaaaaaaaaannanncgggggagagg

SEQ ID NO: 74 - DNA, 545 bp, Homo sapiens
  modified_base (106)..(106): a, c, g, t, unknown, or other
  modified_base (108)..(109): a, c, g, t, unknown, or other
  modified_base (134)..(134): a, c, g, t, unknown, or other
  modified_base (445)..(445): a, c, g, t, unknown, or other
  modified_base (504)..(517): a, c, g, t, unknown, or other
  modified_base (520)..(520): a, c, g, t, unknown, or other
  modified_base (522)..(523): a, c, g, t, unknown, or other
  modified_base (529)..(529): a, c, g, t, unknown, or other
cagtagagatggggcttcatcatgttggccaggtggtcctgaactcctgacctcaagtaatctgcctgccttggccttccaaaatgcttgggattacaggcgtgancnnctgcgcctggtccctattttctttntacaacagaccttgggaaatattttcttcccccaagaggttgaggcccatggaatgcattaggggcaggtggggtggtggtgctctgtagcctttaggacttctagaatcaggcttctgggccaccttcttagcaggtgtatacctctttgttccagactgactttctgtctcacaatatcttcactatttccacagttgcagccaagacaggaaactgaaagctgaggccagaagggtggtgtactggggggaggggaaaattgagtgtcactttggaaaactggggcccccatctaaggattgctgccnctgtagattcaaaagcaataaaacagcagctcattaactcttaaaaaaaaaaaaaaaannnnnnnnnnnnnngtntnnataaanatttttgctttgctgt

SEQ ID NO: 75 - DNA, 590 bp, Homo sapiens
  modified_base (181)..(181): a, c, g, t, unknown, or other
  modified_base (341)..(341): a, c, g, t, unknown, or other
  modified_base (385)..(385): a, c, g, t, unknown, or other
  modified_base (415)..(415): a, c, g, t, unknown, or other
  modified_base (419)..(419): a, c, g, t, unknown, or other
  modified_base (435)..(435): a, c, g, t, unknown, or other
  modified_base (447)..(447): a, c, g, t, unknown, or other
  modified_base (454)..(454): a, c, g, t, unknown, or other
  modified_base (457)..(457): a, c, g, t, unknown, or other
  modified_base (465)..(465): a, c, g, t, unknown, or other
  modified_base (470)..(470): a, c, g, t, unknown, or other
  modified_base (482)..(482): a, c, g, t, unknown, or other
  modified_base (489)..(489): a, c, g, t, unknown, or other
  modified_base (492)..(493): a, c, g, t, unknown, or other
  modified_base (498)..(498): a, c, g, t, unknown, or other
  modified_base (500)..(500): a, c, g, t, unknown, or other
  modified_base (514)..(519): a, c, g, t, unknown, or other
  modified_base (524)..(524): a, c, g, t, unknown, or other
  modified_base (527)..(528): a, c, g, t, unknown, or other
  modified_base (532)..(533): a, c, g, t, unknown, or other
tttttttttggtgacacgatgctgcattctaaaacttttatagttttagactatgtatgatgtgttgttgtaatctccatccaccataggatagagttaaaggcattctttgcaggcatattttgtatgccactgttttttgaaatgtgaaaaaaacgttggcatacttagttattttttnggacaagctacacttcaagcttgtttttaatgttaatttgatagtgtgtgtttttttttttaaacaaatcaagaagctgaaaaatttttaggattgttggtgcttagtagacttgataactattttaaaaatgcgtgaatttagtaaaattctttttttnctcactatgcatgtgtaaatgtttgtaacctggcttccctcttntccagtggtataaagaattgtgccgctttnaggnttgggttttttttttntccagtaaaaantttggtnccntatttgangtttncatttaaaatgngacattnttnngtggnanattcaaatattttnnnnnnctgtnttnntttnngggaaacccctttttatgaaagaaaatttttaggggttgtgctcaaaaatgggtttc

SEQ ID NO: 76 - DNA, 617 bp, Homo sapiens
  modified_base (15)..(15): a, c, g, t, unknown, or other
  modified_base (395)..(395): a, c, g, t, unknown, or other
  modified_base (534)..(534): a, c, g, t, unknown, or other
ttttttttttttttntggttctctgccctttattgcttcacaaattatcacaccaaagatctattatttatgcattacagtacatcagatatgcaggaactgattagatgaaaaactttgtacttttctttattcaaaagcaacaacattaagcattcaaaattatacagttttccctaaactttttaaaggtctactaggacagagaagaaactagtccacaatagctatggatggccattaatactatgatattaataaaaattactcacagtacacagacaacaaattaaatgtctatcagggtaagtttgcttaagtaaatgatgagacaaacataatttaaatctagtcattgacatcagaaaacaactattacatattaaatgggaganaaatggatcctatttatgtaaaattgtaagagaggtgctcagaaagatgttcaccagaaacttaacagtggttatcaatgagtagtgagatctggagtaatgtgttctttcttcctttgtacattgctatattatttgnctttttattaatatacaagtatcattttcacataggtagttttttttttttaataacccacctacagaaagacattcatgttc

SEQ ID NO: 77 - DNA, 1734 bp, Homo sapiens
  modified_base (24)..(25): a, c, g, t, unknown, or other
  modified_base (69)..(69): a, c, g, t, unknown, or other
  modified_base (76)..(76): a, c, g, t, unknown, or other
  modified_base (156)..(156): a, c, g, t, unknown, or other
  modified_base (159)..(159): a, c, g, t, unknown, or other
  modified_base (173)..(173): a, c, g, t, unknown, or other
  modified_base (218)..(218): a, c, g, t, unknown, or other
  modified_base (236)..(236): a, c, g, t, unknown, or other
  modified_base (243)..(243): a, c, g, t, unknown, or other
  modified_base (283)..(283): a, c, g, t, unknown, or other
  modified_base (323)..(324): a, c, g, t, unknown, or other
  modified_base (332)..(332): a, c, g, t, unknown, or other
  modified_base (379)..(379): a, c, g, t, unknown, or other
  modified_base (507)..(507): a, c, g, t, unknown, or other
  modified_base (547)..(547): a, c, g, t, unknown, or other
  modified_base (572)..(572): a, c, g, t, unknown, or other
  modified_base (576)..(576): a, c, g, t, unknown, or other
  modified_base (604)..(607): a, c, g, t, unknown, or other
  modified_base (609)..(609): a, c, g, t, unknown, or other
  modified_base (739)..(745): a, c, g, t, unknown, or other
  modified_base (755)..(755): a, c, g, t, unknown, or other
  modified_base (1449)..(1449): a, c, g, t, unknown, or other
  modified_base (1456)..(1457): a, c, g, t, unknown, or other
  modified_base (1469)..(1469): a, c, g, t, unknown, or other
  modified_base (1526)..(1526): a, c, g, t, unknown, or other
  modified_base (1536)..(1536): a, c, g, t, unknown, or other
  modified_base (1538)..(1538): a, c, g, t, unknown, or other
gccgcacctacaccagccaacccnngatcccgaggtccgacagcgcccggcccagatccccacgcctgnccaggangcaagccgagagccagccggccggcgcactccgactccgagcagtctctgtccttcgacccgagccccgcgccctttccnggnacccctgccccgcngggcagcgctgccaacctgccggccatggagaccccgtcccagcnggcgcgccacccgcagcnggggcgncaggccagctccactccgctgtcgcccacccgcatcaccncggctgcaggagaaggaggacctgcaggagctcaatgatnngcttggcnggtctacatcgaccgtgtgcgctcgctggaaacggagaacgcagggnctgcgccttcgcatcaccgagtctgaagaggtggtcagccgcgaggtgtccggcatcaaggccgcctacgaggccgagctcggggatgcccgcaagacccttgactcagtagccaaggagcgcgcccngcctgcagctggagctgagcaaagtgcgtgaggagtttanaggagctgaaagcgtgcaataccanaganggagggtgacctgatagctgctcaggcnnnngnctgaaggacctggaggctctgctgaactccaaggaggccgcactgagcactgctctcagtgagaagcgcacgctggagggcgagctgcatgatctgcggggccaggtggccaagcttgaggcagccctannnnnnnggccaagaangcaacttcaggatgagatgctgcggcgggtggatgctgagaacaggctgcagaccatgaaggaggaactggacttccagaagaacatctacagtgaggagctgcgtgagaccaagcgccgtcatgagacccgactggtggagattgacaatgggaagcagcgtgagtttgagagccggctggcggatgcgctgcaggaactgcgggcccagcatgaggaccaggtggagcagtataagaaggagctggagaagacttattctgccaagctggacaatgccaggcagtctgctgagaggaacagcaacctggtgggggccgcccacgaggagctgcagcagtcgcgcatccgcatcgacagcctctctgcccagctcagccagctccagaagcagctggcagccaaggaggcgaagcttcgagacctggaggactcactggcccgtgagcgggacaccagccggcggctgctggcggaaaaggagcgggagatggccgagatgcgggcaaggatgcagcagcagctggacgagtaccaggagcttctggacatcaagctggccctggacatggagatccacgcctaccgcaagctcttggagggcgaggaggagaggctacgcctgtcccccagccctacctcgcagcgcagccgtggccgtgcttcctctcactcatcccagacacagggtggngggcagnngtcaccaaaaangcgcaaactggagtccactgagagccgcagcagcttctcacagcacgcacgcactancgggcgcgtngnccgtggaggaggtggacgaggatgaggatggagatgacctgctccatcaccaccacgtgagtggtagccgccgctgaggccgagcctgcactggggccacccagccaggcctgggggcagcctctccccagcctccccgtgccaaaaatcttttcattaaagaatgttttggaactttaaaaaaaaaaaaaaaaaa

SEQ ID NO: 78 - DNA, 3999 bp, Homo sapiens
  modified_base (2855)..(2856): a, c, g, t, unknown, or other
  modified_base (2861)..(2861): a, c, g, t, unknown, or other
  modified_base (2863)..(2864): a, c, g, t, unknown, or other
  modified_base (2869)..(2869): a, c, g, t, unknown, or other
  modified_base (2872)..(2873): a, c, g, t, unknown, or other
  modified_base (2875)..(2876): a, c, g, t, unknown, or other
  modified_base (2879)..(2879): a, c, g, t, unknown, or other
  modified_base (2881)..(2881): a, c, g, t, unknown, or other
  modified_base (3024)..(3024): a, c, g, t, unknown, or other
  modified_base (3409)..(3409): a, c, g, t, unknown, or other
tttttttttttttttttttttttttgtagaagaaaacgattttttaataaatgcttaacccagttcaacatgaagactgggatttggaatgccttaaaagtctgaaggatgttgagttcaatgaggcagaagaagtggttccactgtaatttgtgattgtcgaggaagaggtgtggctgttggtgtgatagtaatactgctggtgactttattggttgttttgtttagtgccccgttaattaagccttgagttcggttatcctgcagtggtgctgaagggctggcaggtctcacagggctggctacagcttgcatgtaaggacttcctaagtgaatgtggattttattatcctcagtagttatcacacttgagctattgctgtttgaacgctgaaactgccatgatgactgccggtctggggagactctgaatatcgcatgcttggcactgatttctgttggttctggggagcgtccctgctcaggagagctagctgaaccagtcacagccaaaacctgaataggggacattgtcctttctggagttagagaaccacaagactctggggtctgtgctctggcaaaggttgccatggtaattggggacatgccttgttctaaattcatgaggtcttcggtagaggttttggactttactggtgttatggaggcgttttggaggatggttatcctttgctttggcgtgccacagttcggtatcactgcagtactcgtgtaagagtgaggactctctgtggttggacttgtgatttcaagagtggctgtgttttgtacatggtctggagtaacctttatatgaagtggctgcccaggtgtgtggcttaggactagatctccaggttgcacaaagttggcattgggtttagtttgcatttttccattctgaagatggccctccttggatttcatccagggaatccatagctttctgttaacaggacatggagtagactggctgcatttgaaggacagcacagatccctcatcattagggtcctcgtcttgattctcactctcctcatataactgaccattgatgactgcacgttccagaggaatgaggctcttgtaatcaggtggttcattgtctactgcttctgtctgaacttctttagaaaatacttgaggatcggaaattcttcttccattgagactaggcctgaggctcttactgaaatgccggtacctctctaactccttagtgaggttttcaatctctcttcctaaatctctgttcctgttttcttgttgatttagtttttttttgcaggactgagtgatctccctggaggtgacatattaggtcttcagttgccatgtattcatgaattttctcttttaatgcatccacttctcttgagaggtgccctgacttagcttcttcttcttgaagccttttgaaaagccattgttcatggctggtctctgtcttttctgctaacttgtacttagcaagttccattttaacatgttctagctctttagataaaaattgagctttgtctcgttcattagcataccttcgttctagagtctcatattcatcttctgttttcatgaggtcatcctcaatggctttcatgtcctttagcttcagtttcagtctttccacttcttgagagagctccttaatcttattgttttcttggtgtaatgctgttgtggatttcccagagtcttgatttaatttgttttttaggaaatctttctcaattgcttccaatgattgaagcctatttttcaacatattaactcttgacaggagatcatttcctttctcttcttccgctttcaatttgttttttaaatcatctctctccttggttacgctgtacatcttttcttctacatcggttttggacttgagcgcccttttagtttcctcaattaacttctcagtaactgttgttactttattttgctccacttgaagctgagaagaagcagcttgtaatttatcttcagttttctttaatttttcactcattgttttccgttcatctacaaacatcacagttaatgttttcagtttagttaaatcctcttttagagtgaattctgtcttttctagccgactttcaatggcttctagctctttgatccttacttttaaactctccagttcttgagacaactgctttgtggtcatcctttctttttctaaattgcatttcagagagtagcattcttgtttgcttttgttgaaagcgtcttctaacttttccagagccataattcttttactgagtttttcaacctctagtttaaagtctttactctgtaacgtctccctttcaagcctcttattgagatctctgcactgctcctccatttttatgagctcttcatctttcccttccatatctagcacacgtttcctgagctcttccacttcagccatgataccagcgtttccatattctcccttactgattttttcttttatatcttgcagctcctcttctgcttttcgtaaagacctgtttgtctcttctaactcatcaatctgccggctgagtgctgccagcttttgttgaagctggcgattttgactgtcctcattggtgagcttcgccataattgtgtcttggtcttggtgaaactttgtggtctgcgtttgcagttccttctctagtctggttgccttctgctcttcctcctgaactctggcttcagcaagggctagtttggtatgtgtttcctttgcatttgtggtcagctcttggattttctgtctttgaagggtgagctgtgccgtcagcctttgctgttcatccaccaccatcaaagcaaaagacttcagcttggtcagctcctctttcagggtggtgacnnttttntnnttttnttnntnnttntnctcctgagacttgatttcttgatcaattagcttctttaatctttcacattcctgttctagtaggcatatgaattcatcactcttctccatgtattctttatgttttctcttttcttcctccaactccaatatggtttgcctangggatttttctgccactaaaagctgtcccaggattcgtctgtaagattctttatgtttttccacaactttgtccaactcattcattggtttctcatagatgtcctcctgccaaggggtagatttcgcttgaaaagcatctctctggagagcctctaacaccttttttggagtgacaaacccatactgagcttccagcaaagccaggtccattttttcagcctttaaaatgcctatgacctcatctcgagcctgcagttctccctccagaatgctgaggagaaataacaggtcatctcttgagaggtcttctgcttggtggccattaccactgtgtggcttctctgccttgggacacggaagtattacatccgactcactgggggnagtctttgtcttgctgtctatgcttcatgtttttaggcccttggaaactgtggcctttagtatgtcttggaaatttcttttgggctgagccctcggtatcactgcctctggaacgcattctttaaagccgtgcaggtaccgtgcaggtgttgatcacacctggtaattccttcttctcatccccaccaaaatccaacagtggaatccaggaccaacaacaacgttttcttcttctctttttggacaccctctcagtttttgttttgtaggcttgaaagccaccgagagtttgcaaccaggggccagtgatagctctgcaaaggagaggcagtggggagcccaacaacaagtaggcccaaacactaaatattgccctcttccctctccgggcagtgtccttcatgctctgaagacaggcagccttaccaaaactcttaccccacagcttgccagtctctgtggaagaaaggttctaactggactgggctgcaggatgaggtgacccaaaagccaggaaccatctgcgcagagcagacaagtagaggcaggcacaggctccgtgagcacgtctgtgtgtgtgtgtgtgtgtg

SEQ ID NO: 79 - DNA, 774 bp, Homo sapiens
  modified_base (2)..(30): a, c, g, t, unknown, or other
  modified_base (208)..(208): a, c, g, t, unknown, or other
  modified_base (436)..(436): a, c, g, t, unknown, or other
  modified_base (631)..(631): a, c, g, t, unknown, or other
tnnnnnnnnnnnnnnnnnnnnnnnnnnnnntttttttttttttgctgataagaattcttttatgttattccaataaaaaatacattcatacagaaatataacaatcttgcaaaaaacaatttcaaataaaatcttgtaaaacaaaattttacaaaaatcttacaaagattctttagataacagggtgcttccaaaaaaaaaaaaaaangaaatttcactaatagaaatttttttttaatttcaagcaaaaagtttctgcttgattgaggctcagttatcacctgaacagaatgtacttctttatgtacgtgctaattatgaaaatcacaggcattgacaggtacggtacccagccccacccaggcaaacagctccgacatgtttcgtaagtgagacaagccagtgcaagtttttttttttcctttttttttttttngtcttttgcttaccttcttgcttaatggaattgttatggctaagcacatagaaggccaaaaaaggagttttccaaacccagcaaatcaagtgcttggattctgaactgccaaaagaaaactgcacttcccctcttaagtaaaacgaaatgagtttcttaggtaaatgtattcatcagcccagataaaaaaaaaanccagttatgtgagcgttagtcactgctcatttccaggaagatcaaacaaaataccagcccagccagactcacatgtgtgtatatatatataaagcaaagagccacacccacaagccagcagctgggtgaaatatcagctgtcc

SEQ ID NO: 80 - DNA, 338 bp, Homo sapiens
  modified_base (182)..(182): a, c, g, t, unknown, or other
  modified_base (185)..(186): a, c, g, t, unknown, or other
  modified_base (188)..(190): a, c, g, t, unknown, or other
  modified_base (192)..(192): a, c, g, t, unknown, or other
  modified_base (194)..(200): a, c, g, t, unknown, or other
  modified_base (202)..(203): a, c, g, t, unknown, or other
  modified_base (205)..(205): a, c, g, t, unknown, or other
  modified_base (207)..(207): a, c, g, t, unknown, or other
  modified_base (210)..(210): a, c, g, t, unknown, or other
  modified_base (276)..(276): a, c, g, t, unknown, or other
ggtaaggttgaatgcacttttggtttttggtcatgttcggttggtcaaagataaaaactaagtttgagagatgaatgcaaaggaaaaaaatattttccaaagtccatgtgaaattgtctcccattttttggcttttgagggggttcagtttgggttgcttgtctgtttccgggttggggggnaanntnnntngnnnnnnnanncngnttngtgctttgggaagttgtctctgaaacccggggacagaggacgcaggacagactaggagggagccgnggagattgggctgcagctgtggaggagggtttcagaggagagaggtccggagagcagaggcc

SEQ ID NO: 81 - DNA, 514 bp, Homo sapiens
  modified_base (32)..(32): a, c, g, t, unknown, or other
tttttttttttttttttttttttttttttttnttttttttttcttcttcttaatggccccagaagttgacagctttgcccgctcttggatcaccaagctccgatagtgttcgtcacatggatggtcccacatagactgcccgttggcgaagttgaaatagtaaatgtcacctgtgatgtcctggcatggtttccactctccaggcagtggggccacgatgccctctcgcgccagccacatcagttctggttccttgatgggatcaataccaatctcccgggcaaattcaagaatttcttgctcactaggaatgtaggtctcatcataatcttcttccagaaccagctgatctcctatgcggaggggtcgtccagccatgactcatctgggctcaaacacccgccagacccccagcccgggcccggtggcccgctcaggagccggcgagatttcaaacggaggaactgtcgcctggcagtccgattttcacttcttccctcagtcccctcgtgcc

SEQ ID NO: 82 - DNA, 1109 bp, Homo sapiens
ggcacgagggaggtggccccggatgctgcggcgcccgctggccgggctggctgcggccgccctgggccgggccccaccggacggcttgctctgctctttacctggggttgctgtcgaggaccctgtgcaagactcggccggtttttctttctccctgatggacagacccaaacatagccgcgcagcatcgtgaagggctggggccttcactcctctgtggctctggaagagcccgatttcctcaggaggcatgtcgggccccaggcctgtggtgctgagcgggccttcgggagctgggaagagcaccctgctgaagaggctgctccaggagcacagcggcatctttggcttcagcgtgtcccataccacgaggaacccgaggcccggcgaggagaacggcaaagattactactttgtaaccagggaggtgatgcagcgtgacatagcagccggcgacttcatcgagcatgccgagttctcggggaacctgtatggcacgagcaaggtggcggtgcaggccgtgcaggccatgaaccgcatctgtgtgctggacgtggacctgcagggtgtgcggaacatcaaggccaccgatctgcggcccatctacatctctgtgcagccgccttcactgcacgtgctggagcagcggctgcggcagcgcaacactgaaaccgaggagagcctggtgaagcggctggctgctgcccaggccgacatggagagcagcaaggagcccggcctgtttgatgtggtcatcattaacgacagcctggaccaggcctacgcagagctgaaggaggcgctctctgaggaaatcaagaaagctcaaaggaccggcgcctgaggcttgctgtctgttctcggcaccccgggcccatacaggaccagggcagcagcattgagccacccccttggcaggcgatacggcagctctgtgcccttggccagcatgtggagtggaggagatgctgcccctgtggttggaacatcctggggtgacccccgacccagcctcgctgggctgtcccctgtccctatctctcactctggacccagggctgacatcctaataaaataactgttggattagaaaaaaaaaaaaaaaaaaa

SEQ ID NO: 83 - DNA, 4153 bp, Homo sapiens
  modified_base (42)..(43): a, c, g, t, unknown, or other
  modified_base (46)..(49): a, c, g, t, unknown, or other
  modified_base (51)..(53): a, c, g, t, unknown, or other
  modified_base (63)..(64): a, c, g, t, unknown, or other
  modified_base (71)..(71): a, c, g, t, unknown, or other
  modified_base (88)..(88): a, c, g, t, unknown, or other
  modified_base (102)..(102): a, c, g, t, unknown, or other
  modified_base (106)..(106): a, c, g, t, unknown, or other
  modified_base (109)..(109): a, c, g, t, unknown, or other
  modified_base (153)..(153): a, c, g, t, unknown, or other
  modified_base (1542)..(1542): a, c, g, t, unknown, or other
  modified_base (3105)..(3105): a, c, g, t, unknown, or other
  modified_base (3121)..(3121): a, c, g, t, unknown, or other
  modified_base (3407)..(3407): a, c, g, t, unknown, or other
ccccggcccggccgggcagctggtaggtgccgtgcgcaaccnnccnnnngnnnccgccccttnnccctttnatgggaatacttttttnaaaaaaaaagagtntcgntgncgccaccccgtaggactggccgccctaaaaccgtgataaagganctgctcgccacttctcacttccgcttccttccagtaaggagtcggggtcttccccagttttctcagccaggcggcggcggcgactggcaatgtttggcctcaaaagaaacgcggtaatcggactcaacctctactgtgggggggccggcttgggggccggcagcggcggcgccacccgcccgggagggcgacttttggctacggagaaggaggcctcggcccggcgagagatagggggaggggaggccggcgcggtgattggcggaagcgccggcgcaagccccccgtccaccctcacgccagactcccggagggtcgcgcggccgccgcccattggcgccgaggtccccgacgtcaccgcgacccccgcgaggctgcttttcttcgcgcccacccgccgcgcggcgccgcttgaggagatggaagccccggccgctgacgccatcatgtcgcccgaagaggagctggacgggtacgagccggagcctctcgggaagcggccggctgtcctgccgctgctggagttggtcggggaatctggtaataacaccagtacggacgggtcactaccctcgacgccgccgccagcagaggaggaggaggacgagttgtaccggcagtcgctggagattatctctcggtaccttcgggagcaggccaccggcgccaaggacacaaagccaatgggcaggtctggggccaccagcaggaaggcgctggagaccttacgacgggttggggatggcgtgcagcgcaaccacgagacggccttccaaggcatgcttcggaaactggacatcaaaaacgaagacgatgtgaaatcgttgtctcgagtgatgatccatgttttcagcgacggcgtaacaaactggggcaggattgtgactctcatttcttttggtgcctttgtggctaaacacttgaagaccataaaccaagaaagctgcatcgaaccattagcagaaagtatcacagacgttctcgtaaggacaaaacgggactggctagttaaacaaagaggctgggatgggtttgtggagttcttccatgtagaggacctagaaggtggcatcaggaatgtgctgctggcttttgcaggtgttgctggagtaggagctggtttggcatatctaataagatagccttactgtaagtgcaatagttgacttttaaccaaccaccaccaccaccaaaaccagtttatgcagttggactccaagctgtaacttcctagagttgcaccctagcaacctagccagaaaagcaagtggcaagaggattatggctaacaagaataaatacatgggaagagtgctccccattgattgaagagtcactgtctgaaagaagcaaagttcagtttcagcaacaaacaaactttgtttgggnaagctatggaggaggacttttagatttagtgaagatggtagggtggaaagacttaatttccttgttgagaacaggaaagtggccagtagccaggcaagtcatagaattgattacccgccgaattcattaatttactgtagtagtgttaagagaagcactaagaatgccagtgacctgtgtaaaagttacaagtaatagaactatgactgtaagcctcagtactgtacaagggaagcttttcctctctctaattagctttcccagtatacttcttagaaagtccaagtgttcaggacttttatacctgttatactttggcttggtttccatgattcttactttattagcctagtttatcaccaataatacttgacggaaggctcagtaattagttatgaatatggatatcctcaattcttaagacagcttgtaaatgtatttgtaaaaattgtatatatttttacagaaagtctatttctttgaaacgaaggaagtatcgaatttacattagtttttttcatacccttttgaactttgcaacttccgtaattaggaacctgtttcttacagcttttctatgctaaactttgttctgttcagttctagagtgtatacagaacgaattgatgtgtaactgtatgcagactggttgtagtggaacaaatctgataactatgcaggtttaaattttcttatctgattttggtaagtattccttagataggtttttctttgaaaacctgggattgagaggttgatgaatggaaattctttcacttcattatatgcaagttttcaataattaggtctaagtggagttttaaggttactgatgacttacaaataatgggctctgattgggcaatactcatttgagttccttccatttgacctaatttaactggtgaaatttaaagtgaattcatgggctcatctttaaagcttttactaaaagattttcagctgaatggaactcattagctgtgtgcatataaaaagatcacatcaggtggatggagagacatttgatcccttgtttgcttaataaattataaaatgatggcttggaaaagcaggctagtctaaccatggtgctattattaggcttgcttgttacacacacaggtctaagcctagtatgtcaataaagcaaatacttactgttttgtttctattaatgattcccaaaccttgttgcaagtttttgcattggcatctttggatttcagtcttgatgtttgttctatcagacttaaccttttatttcctgtccttccttgaaattgctgattgttctgctccctctacagatatttatatcaattcctacagctttcccctgccatccctgaactctttctagcccttttagattttggcactgtgaaacccctgctggaaacctgagtgaccctccctccccaccaagagtccacagacctttcatctttcacgaacttgatcctgttagcaggtggtaataccatgggtgctgtgacactaacagtcattgagaggtgggaggaagtcccttttccttggactggtatcttttcaactatngttttatcctgtcttngggggcaatgtgtcaaaagtcccctcaggaattttcagaggaaagaacattttatgaggctttctctaaagtttcctttgtataggagtatgctcacttaaatttacagaaagaggtgagctgtgttaaacctcagagtttaaaagctactgataaactgaagaaagtgtctatattggaactagggtcatttgaaagcttcagtctcggaacatgacctttagtctgtggactccatttaaaaataggtatgaataagatgactaagaatgtaatggggaagaantgccctgcctgcccatctcagagccataaggtcatctttgctagagctatttttacctatgtatttatcgttcttgatcataagccgcttatttatatcatgtatctctaaggacctaaaagcactttatgtagtttttaattaatcttaagatctggttacggtaactaaaaaagcctgtctgccaaatccagtggaaacaagtgcatagatgtgaattggtttttaggggccccacttcccaattcattaggtatgactgtggaaatacagacaaggatcttagttgatattttgggcttggggcagtgagggcttaggacaccccaagtggtttgggaaaggaggaggggagtggtgggtttatagggggaggaggaggcaggtggtctaagtgctgactggctacgtagttcgggcaaatcctccaaaagggaaagggaggatttgcttagaaggatggcgctcccagtgactactttttgacttctgtttgtcttacgcttctctcagggaaaaacatgcagtcctctagtgtttcatgtacattctgtggggggtgaacaccttggttctggttaaacagctgtacttttgatagctgtgccaggaagggttaggaccaactacaaattaatgttggttgtcaaatgtagtgtgtttccctaactttctgtttttcctgagaaaaaaaaataaatcttttattcaaataaaaaaaaaaaaaaaaaaaaaaaaaaaaaaaa

SEQ ID NO: 84 - DNA, 2430 bp, Homo sapiens
gtcggggtcttccccagttttctcagccaggcggcggcggcgactggcaatgtttggcctcaaaagaaacgcggtaatcggactcaacctctactgtgggggggccggcttgggggccggcagcggcggcgccacccgcccgggagggcgacttttggctacggagaaggaggcctcggcccggcgagagatagggggaggggaggccggcgcggtgattggcggaagcgccggcgcaagccccccgtccaccctcacgccagactcccggagggtcgcgcggccgccgcccattggcgccgaggtccccgacgtcaccgcgacccccgcgaggctgcttttcttcgcgcccacccgccgcgcggcgccgcttgaggagatggaagccccggccgctgacgccatcatgtcgcccgaagaggagctggacgggtacgagccggagcctctcgggaagcggccggctgtcctgccgctgctggagttggtcggggaatctggtaataacaccagtacggacgggtcactaccctcgacgccgccgccagcagaggaggaggaggacgagttgtaccggcagtcgctggagattatctctcggtaccttcgggagcaggccaccggcgccaaggacacaaagccaatgggcaggtctggggccaccagcaggaaggcgctggagaccttacgacgggttggggatggcgtgcagcgcaaccacgagacggccttccaaggcatgcttcggaaactggacatcaaaaacgaagacgatgtgaaatcgttgtctcgagtgatgatccatgttttcagcgacggcgtaacaaactggggcaggattgtgactctcatttcttttggtgcctttgtggctaaacacttgaagaccataaaccaagaaagctgcatcgaaccattagcagaaagtatcacagacgttctcgtaaggacaaaacgggactggctagttaaacaaagaggctgggatgggtttgtggagttcttccatgtagaggacctagaaggtggcatcaggaatgtgctgctggcttttgcaggtgttgctggagtaggagctggtttggcatatctaataagatagccttactgtaagtgcaatagttgacttttaaccaaccaccaccaccaccaaaaccagtttatgcagttggactccaagctgtaacttcctagagttgcaccctagcaacctagccagaaaagcaagtggcaagaggattatggctaacaagaataaatacatgggaagagtgctccccattgattgaagagtcactgtctgaaagaagcaaagttcagtttcagcaacaaacaaactttgtttgggaagctatggaggaggacttttagatttagtgaagatggtagggtggaaagacttaatttccttgttgagaacaggaaagtggccagtagccaggcaagtcatagaattgattacccgccgaattcattaatttactgtagtagtgttaagagaagcactaagaatgccagtgacctgtgtaaaagttacaagtaatagaactatgactgtaagcctcagtactgtacaagggaagcttttcctctctctaattagctttcccagtatacttcttagaaagtccaagtgttcaggacttttatacctgttatactttggcttggttccatgattcttactttattagcctagtttatcaccaataatacttgacggaaggctcagtaattagttatgaatatggatatcctcaattcttaagacagcttgtaaatgtatttgtaaaaattgtatatatttttacagaaagtctatttccttgaaacgaaggaagtatcgaatttacattagtttttttcatacccttttgaactttgcaacttccgtaattaggaacctgtttcttacagcttttctatgctaaactttgttctgttcagttctagagtgtatacagaacgaattgatgtgtaactgtatgcagactggttgtagtggaacaaatctgataactatgcaggtttaaattttcttatctgattttggtaagtattccttagataggttttctttgaaaacctgggattgagaggttgatgaatggaaattctttcacttcattatatgcaagttttcaataattaggtctaagtggagttttaaggttactgatgacttacaaataatgggctctgattgggcaatactcatttgagttccttccatttgacctaatttaactggtgaaatttaaagtgaattcatgggctcatctttaaagcttttactaaaagattttcagctgaatggaactcattagctgtgtgcatataaaaagatcacatcaggtggatggagagacatttgatcccttgtttgcttaataaattataaaatgatggcttggaaaaaaaaaaaaaaaa

SEQ ID NO: 85 - DNA, 2387 bp, Homo sapiens
gctgctgcgacagtccactacctttttcgagagtgactcccgttgtcccaaggcttcccagagcgaacctgtgcggctgcaggcaccggcgcgtcgagtttccggcgtccggaaggaccgagctcttctcgcggatccagtgttccgtttccagcccccaatctcagagccgagccgacagagagcagggaaccggcatggccaaagccgcggcgatcggcatcgacctgggcaccacctactcctgcgtgggggtgttccaacacggcaaggtggagatcatcgccaacgaccagggcaaccgcaccacccccagctacgtggccttcacggacaccgagcggctcatcggggatgcggccaagaaccaggtggcgctgaacccgcagaacaccgtgtttgacgcgaagcggctgatcggccgcaagttcggcgacccggtggtgcagtcggacatgaagcactggcctttccaggtgatcaacgacggagacaagcccaaggtgcaggtgagctacaagggggacaccaaggcattctaccccgaggagatctcgtccatggtgctgaccaagatgaaggagatcgccgaggcgtacctgggctacccggtgaccaacgcggtgatcaccgtgccggcctacttcaacgactcgcagcgccaggccaccaaggatgcgggtgtgatcgcggggctcaacgtgctgcggatcatcaacgagcccacggccgccgccatcgcctacggcctggacagaacgggcaagggggagcgcaacgtgctcatctttgacctgggcgggggcaccttcgacgtgtccatcctgacgatcgacgacggcatcttcgaggtgaaggccacggccggggacacccacctgggtggggaggactttgacaacaggctggtgaaccacttcgtggaggagttcaagagaaaacacaagaaggacatcagccagaacaagcgagccgtgaggcggctgcgcaccgcctgcgagagggccaagaggaccctgtcgtccagcacccaggccagcctggagatcgactccctgtttgagggcatcgacttctacacgtccatcaccagggcgaggttcgaggagctgtgctccgacctgttccgaagcaccctggagcccgtggagaaggctctgcgcgacgccaagctggacaaggcccagattcacgacctggtcctggtcgggggctccacccgcatccccaaggtgcagaagctgctgcaggacttcttcaacgggcgcgacctgaacaagagcatcaaccccgacgaggctgtggcctacggggcggcggtgcaggcggccatcctgatgggggacaagtccgagaacgtgcaggacctgctgctgctggacgtggctcccctgtcgctggggctggagacggccggaggcgtgatgactgccctgatcaagcgcaactccaccatccccaccaagcagacgcagatcttcaccacctactccgacaaccaacccggggtgctgatccaggtgtacgagggcgagagggccatgacgaaagacaacaatctgttggggcgcttcgagctgagcggcatccctccggcccccaggggcgtgccccagatcgaggtgaccttcgacatcgatgccaacggcatcctgaacgtcacggccacggacaagagcaccggcaaggccaacaagatcaccatcaccaacgacaagggccgcctgagcaaggaggagatcgagcgcatggtgcaggaggcggagaagtacaaagcggaggacgaggtgcagcgcgagagggtgtcagccaagaacgccctggagtcctacgccttcaacatgaagagcgccgtggaggatgaggggctcaagggcaagatcagcgaggccgacaagaagaaggtgctggacaagtgtcaagaggtcatctcgtggctggacgccaacaccttggccgagaaggacgagtttgagcacaagaggaaggagctggagcaggtgtgtaaccccatcatcagcggactgtaccagggtgccggtggtcccgggcctgggggcttcggggctcagggtcccaagggagggtctgggtcaggccccaccattgaggaggtagattaggggcctttccaagattgctgtttttgttttggagcttcaagactttgcatttcctagtatttctgtttgtcagttctcaatttcctgtgtttgcaatgttgaaattttttggtgaagtactgaacttgctttttttccggtttctacatgcagagatgaatttatactgccatcttacgactatttcttctttttaatacacttaactcaggccattttttaagttggttacttcaaagtaaataaactttaaaattcaagtga

SEQ ID NO: 86 - DNA, 3757 bp, Homo sapiens
gcttgccacatgtactatgtggagagatgtaccaccctgcatcagcttttaccctacagaaggaaatcagcgttccattatattttattgttatcaacagtttaggaatacatagctttgcttttgcctttttctttccttccccttgtttcccctcgcctcagagaaaagaaggaaaaaaaaattcatctttcctacccccctctttttggatgataggacttgaagacaatctgaaataccacataaactcacttccagatgttttttgtttcatatgcaattgaattgggctcagactgtgtttttaagctgtatggtaaaaatatcactgtcttctagggccttattggggggcagggagagacgtgacactttgtcagaagggattgagtctgctaacttaaactctccttgattcaggaatacaaagtctccagctgtgaacagagactcatcagtgaaatagagtacaggctagaaaggtctcctatggatgaatcatggtgatgaacgttcacgtacggcagacgctgcctcgtggaaaactggaatggcaccattctttgagatgaagctgaaacattacaagatctttgagggaatgccagtaactttcacatgtagagttgctggaaatccaaagccaaagatctattggtttaaagatgggaagcagatctctccaaagagtgatcactacaccattcaaagagatctcgatgggacctgctccctccataccacagcctccaccctagatgatgatgggaattatacaattatggctgcaaaccctcagggccgcatcagttgtactggacggctaatggtacaggctgtcaaccaaagaggtcgaagtccccggtctccctcaggccatcctcatgtcagaaggcctcgttctagatcaagggacagtggagacgaaaatgaaccaattcaggagcgattcttcagacctcacttcttgcaggctcctggagatctgactgttcaagaaggaaaactctgcagaatggactgcaaagtcagtgggttaccaaccccagatctaagctggcaactagatggaaagcccgtacgccctgacagtgctcacaagatgctggtgcgtgagaacggggtgcactctctgatcatagagccagtcacgtcacgtgatgccggcatctacacatgtatagctaccaaccgagcaggacagaactcattcagcctggagcttgtggttgctgctaaagaagcacacaaaccccctgtgtttattgagaagctccaaaacacaggagttgctgatgggtacccagtgcggctggaatgtcgtgtattgggagtgccaccacctcagatattttggaagaaagaaaatgaatcactcactcacagcactgaccgagtgagcatgcaccaggacaaccacggctacatctgcctgctcattcagggagccacaaaagaagatgctgggtggtatactgtgtcagccaagaatgaagcagggattgtgtcctgtactgccaggctggacgtttacacccagtggcatcagcagtcacagagcaccaagccaaaaaaagtacggccctcagccagtcgctatgcagcactttcggaccagggactagacatcaaagcagcgttccaacctgaggccaacccatctcacctgacactgaatactgccttggtagaaagtgaggacctgtaatccagcattcttgttaaagctgaaacactgaaacagccattgccttgaccaacatattcctttgtcacattatgtaaaaggcagaaacatacctttgactataagaaattaaaaaaaaacaccaaaataatatttttcttacttgatataccaaacttagtttaagtagataatgctaatacaaatatacacattgcacagaaaatacacatttactgtccaatttaaaactttggaattgctgtgattaaagtgatcaaaatgccaaaatactaaaggaaatcaattgttcacaggtaactacaatttgtattatctacaagtgcctttaaacacaagatataggtgctgtgtagcctgatagtgtgaaatgtttaatgagggagttgtaccacaaacagtactacaatgattctgaagcacagtgtattcagacagatacagtgaaccaagtgcaatatgtaaggatgaaagaagaagagatgacaaagaaatccaagtaaatgccttgtctttgcaaatgtttttatattaaatcataaggaaggaactacttgccttaaatgttaatatcaaaagagttttctaacaaggttaataccttagttcttaacattttttttctttatgtgtagtgttttcatgctaccttggtaggaaacttatttacaaaccatattaaaaggctaatttaaatataaataatataaagtgctctgaataaagcagaaatatattacagttcattccacagaaagcatccaaaccacccaaatgaccaaggcatatatagtatttggaggaatcaggggtttggaaggagtagggaggagaatgaaggaaaatgcaaccagcatgattatagtgtgttcatttagataaaagtagaaggcacaggagaggtagcaaaggccaggcttttctttggttttcttcaaacataggtgaaaaaaacactgccattcacaagtcaaggaacccagggccagctggaagtgtggagcacacatgctgtggagcacacatgctgtggagattgcagtgtgtctgaggtttgtgtagtagtggaagattttaggtatgtagagcaagttgaaaatggattgagactgcatggtggcataaatgagaaattgcctgtagcatctagtctacttgaaggaagtggagacataaggagagacaaaaacaggtttgtgccataaagtattttttcaaagacaccaagatgtggtaaatgaaaattattagttcacttccctgctgccatgaaactttgccttaagaaggtgctggattccaaggtttgtaaaggcatctcggtaaagactgctttttgaatgcatatgattttgcatcagctagactgagttgattctgaccagacttgatggttttaagtcggaaccgataaattttaaaaaggagaaaaaataatttgacctagtagtataaaacatgaggctttaatggtactttgctatgaaaagaaaacactgtattccttatgcaaaacacatgtatctttcattatttataagtggcctctcttagctcagttactcaattcatacgtagtattttttaaaataattttatatctgtgtaccaccccatatatttcatattactgtttcacatgtacagctttctacttctttgtaagaacaccaaccaaccaaggtttaagtgattaataggcttgagcaccgggtggcagatgttctatgcagtgtggttcaagtttctttgaccgcacttatatgcattgctaatatggaatttaagataccatacacagtctctcatggacctatctctattgtagaattatgacttatgtcttacttggcaaatttttctgaatgtgacctttttttgctgatttgctgggtttgggattaactagcattattttgccacctttatattgtatttataaaaaaaaagtactatcaatcaatcatactactttggattgttgtgctggtgtaatgtggatttaacatcaataaatatttgacaaataaaaaaaaaaaaaaaaaa

SEQ ID NO: 87 - DNA, 3903 bp, Homo sapiens
  modified_base (6)..(6): a, c, g, t, unknown, or other
  modified_base (9)..(9): a, c, g, t, unknown, or other
  modified_base (17)..(21): a, c, g, t, unknown, or other
  modified_base (23)..(25): a, c, g, t, unknown, or other
  modified_base (27)..(27): a, c, g, t, unknown, or other
  modified_base (31)..(31): a, c, g, t, unknown, or other
  modified_base (36)..(37): a, c, g, t, unknown, or other
  modified_base (40)..(47): a, c, g, t, unknown, or other
  modified_base (49)..(52): a, c, g, t, unknown, or other
  modified_base (55)..(55): a, c, g, t, unknown, or other
  modified_base (146)..(146): a, c, g, t, unknown, or other
  modified_base (235)..(235): a, c, g, t, unknown, or other
  modified_base (507)..(507): a, c, g, t, unknown, or other
  modified_base (1978)..(1978): a, c, g, t, unknown, or other
  modified_base (3169)..(3169): a, c, g, t, unknown, or other
  modified_base (3268)..(3268): a, c, g, t, unknown, or other
  modified_base (3275)..(3275): a, c, g, t, unknown, or other
  modified_base (3308)..(3308): a, c, g, t, unknown, or other
tatttnttntttttttnnnnntnnntntttnttttnnttnnnnnnnntnnnnttnttatttgtcaaatatttattgatgttaaatccacattacaccagcacaacaatccaaagtagtatgattgattgatagtactttttttttnataaatacaatataaaggtggcaaaataatgctagttaatcccaaacccagcaaatcagcaaaaaaaggtcacattcagaaaaatttgncaagtaagacataagtcataattctacaatagagataggtccatgagagactgtgtatggtatcttaaattccatattagcaatgcatataagtgcggtcaaagaaacttgaaccacactgcatagaacatctgccacccggtgctcaagcctattaatcacttaaaccttggttggttggtgttcttacaaagaagtagaaagctgtacatgtgaaacagtaatatgaaatatatggggtggtacacagatataaaattattttaaaaaantactacgtatgaattgagtaactgagctaagagaggccacttataaataatgaaagatacatgtgttttgcataaggaatacagtgttttcttttcatagcaaagtaccattaaagcctcatgttttatactactaggtcaaattattttttctcctttttaaaatttatcggttccgacttaaaaccatcaagtctggtcagaatcaactcagtctagctgatgcaaaatcatatgcattcaaaaagcagtctttaccgagatgcctttacaaaccttggaatccagcaccttcttaaggcaaagtttcatggcagcagggaagtgaactaataattttcatttaccacatcttggtgtctttgaaaaaatactttatggcacaaacctgtttttgtctctccttatgtctccacttccttcaagtagactagatgctacaggcaatttctcatttatgccaccatgcagtctcaatccattttcaacttgctctacatacctaaaatcttccactactacacaaacctcagacacactgcaatctccacagcatgtgtgctccacagcatgtgtgctccacacttccagctggccctgggttccttgacttgtgaatggcagtgtttttttcacctatgtttgaagaaaaccaaagaaaagcctggcctttgctacctctcctgtgccttctacttttatctaaatgaacacactataatcatgctggttgcattttccttcattctcctccctactccttccaaacccctgattcctccaaatactatatatgccttggtcatttgggtggtttggatgctttctgtggaatgaactgtaatatatttctgctttattcagagcactttatattatttatatttaaattagccttttaatatggtttgtaaataagtttcctaccaaggtagcatgaaaacactacacataaagaaaaaaaatgttaagaactaaggtattaaccttgttagaaaactcttttgatattaacatttaaggcaagtagttccttccttatgatttaatataaaaacatttgcaaagacaaggcatttacttggatttctttgtcatctcttcttctttcatccttacatattgcacttggttcactgtatctgtctgaatacactgtgcttcagaatcattgtagtactgtttgtggtacaactccctcattaaacatttcacactatcaggctacacagcacctatatcttgtgtttaaaggcacttgtagataatacaaattgtagttacctgtgaacaattgatttcctttagtattttggcattttgatcactttaatcacagcaattccaaagttttaaattggacagtaaatgtgtattttctgtgcaatgtgtatatttgtattagcattatctacttaaactaagtttggtatatcaagtaagaaaaatattattttggtgtttttttttnaatttcttatagtcaaaggtatgtttctgccttttacataatgtgacaaaggaatatgttggtcaaggcaatggctgtttcagtgtttcagctttaacaagaatgctggattacaggtcctcactttctaccaaggcagtattcagtgtcaggtgagatgggttggcctcaggttggaacgctgctttgatgtctagtccctggtccgaaagtgctgcatagcgactggctgagggccgtactttttttggcttggtgctctgtgactgctgatgccactgggtgtaaacgtccagcctggcagtacaggacacaatccctgcttcattcttggctgacacagtataccacccagcatcttcttttgtggctccctgaatgagcaggcagatgtagccgtggttgtcctggtgcatgctcactcggtcagtgctgtgagtgagtgattcattttctttcttccaaaatatctgaggtggtggcactcccaatacacgacattccagccgcactgggtacccatcagcaactcctgtgttttggagcttctcaataaacacagggggtttgtgtgcttctttagcagcaaccacaagctccaggctgaatgagttctgtcctgctcggttggtagctatacatgtgtagatgccggcatcacgtgacgtgactggctctatgatcagagagtgcaccccgttctcacgcaccagcatcttgtgagcactgtcagggcgtacgggctttccatctagttgccagcttagatctggggttggtaacccactgactttgcagtccattctgcagagttttccttcttgaacagtcagatctccaggagcctgcaagaagtgaggtctgaagaatcgctcctgaattggttcattttcgtctccactgtcccttgatctagaacgaggccttctgacatgaggatggcctgagggagaccggggacttcgacctctttggttgacagcctgtaccattagccgtccagtacaactgatgcggccctgagggtttgcagccataattgtataattcccatcatcatctagggtggaggctgtggtatggagggagcaggtcccatcgagatctctttgaatggtgtagtgatcactctttggagagatctgcttcccatctttaaaccaatagatctttggctttggatttccagcnactctacatgtgaaagttactggcattccctcaaagatcttgtaatgtttcagcttcatctcaaagaatggtgccattccagttttccacgaggcagcntctgccntacgtgaacgttcatcaccatgagttcatccanaggagacctttctagcctgtactctatttcactgatgagtctctgttcacagctggagactttgtattcctgaatcaaggagagtttaagttagcagactcaatcccttctgacaaagtgtcacgtctctccctgccccccaataaggccctagaagacagtgatatttttaccatacagcttaaaaacacagtctgagcccaattcaattgcatatgaaacaaaaaacatctggaagtgagtttatgtggtatttcagattgtcttcaagtcctatcatccaaaaagaggggggtaggaaagatgaatttttttttccttcttttctctgaggcgaggggaaacaaggggaaggaaagaaaaaggcaaaagcaaagctatgtattcctaaactgttgataacaataaaatataatggaacgctgatttccttctgtagggtaaaagctgatgcagggtggtacatctctccacatagtacatgtggcaagcagctgccatattatatacaattatagtaaaagaataatagaaaaaatggtactagaaaaaatggtaatagaaaaaatagtaaaagaataataggaaaaaaaaa

SEQ ID NO: 88 - DNA, 655 bp, Homo sapiens
tgctcggtcagtcagtcggcggccggcgcccggcttgtgctcagacctcgcgcttgcggcgcccaggcccagcggccgtagctagcgtctggcctgagaacctcggcgctccggcggcgcgggcaccacgagcggagcttcgcagcggctccagaggaggcaggcgagtgagcgagtccgaggggtggccggggcaggtggtggcgccgcgaagatggtcgccaagcaaaggatccgtatggccaacgagaagcacagcaagaacatcacccagcgcggcaacgtcgccaagacctcgagaaatgcccccgaagagaaggcgtctgtaggaccctggttattggctctcttcatttttgttgtctgtggttctgcaattttccagattattcaaagtatcaggatgggcatgtgaagtgactgaccttaagatgtttccattctcctgtgaatttttaacttgaactcattcctgatgtttgataccctggttgaaaacaattcagtaaagcatcctgcctcagaatgactttcctatcatgcttcatgtgtcattccaaggtttcttcatgagtcattccaagttttctagtccataccacagtgccttgcaaaaaacaccacatgaataaagcaataaaatttgattgttaag

SEQ ID NO: 89 - DNA, 1330 bp, Homo sapiens
gcagcccagccaagcactgtcaggaatcctgtgaagcagctccagctatgtgtgaagaagaggacagcactgccttggtgtgtgacaatggctctgggctctgtaaggccggctttgctggggacgatgctcccagggctgttttcccatccattgtgggacgtcccagacatcagggggtgatggtgggaatgggacaaaaagacagctacgtgggtgacgaagcacagagcaaaagaggaatcctgaccctgaagtacccgatagaacatggcatcatcaccaactgggacgacatggaaaagatctggcaccactctttctacaatgagcttcgtgttgcccctgaagagcatcccaccctgctcacggaggcacccctgaaccccaaggccaaccgggagaaaatgactcaaattatgtttgagactttcaatgtcccagccatgtatgtggctatccaggcggtgctgtctctctatgcctctggacgcacaactggcatcgtgctggactctggagatggtgtcacccacaatgtccccatctatgagggctatgccttgccccatgccatcatgcgtctggatctggctggccgagatctcactgactacctcatgaagatcctgactgagcgtggctattccttcgttactactgctgagcgtgagattgtccgggacatcaaggagaaactgtgttatgtagctctggactttgaaaatgagatggccactgccgcatcctcatcctcccttgagaagagttacgagttgcctgatgggcaagtgatcaccatcggaaatgaacgtttccgctgcccagagaccctgttccagccatccttcatcgggatggagtctgctggcatccatgaaaccacctacaacagcatcatgaagtgtgatattgacatcaggaaggacctctatgctaacaatgtcctatcagggggcaccactatgtaccctggcattgccgaccgaatgcagaaggagatcacggccctagcacccagcaccatgaagatcaagatcattgcccctccggagcgcaaatactctgtctggatcggtggctccatcctggcctctctgtccaccttccagcagatgtggatcagcaaacaggaatacgatgaagccgggccttccattgtccaccgcaaatgcttctaaaacactttcctgctcctctctgtctctagcacacaactgtgaatgtcctgtggaattatgccttcagttcttttccaaatcattcctagccaaagctctgactcgttacctatgtgttttttaataaatctgaaataggctactggtaa

SEQ ID NO: 90 - DNA, 1173 bp, Homo sapiens
aggccaagatggcggcagctgcggcttcgcttcgcggggtagtgttgggcccgcggggcgcggggctcccgggcgcgcgtgcccggggtctgctgtgcagcgcgcggcccgggcagctcccgctacggacacctcaggcagtggccttgtcgtcgaagtctggcctttcccgaggccggaaagtgatgctgtcagcgctgggcatgctggcggcagggggtgcggggctggccgtggctctgcattcggctgtgagtgccagtgacctggaggtgcacccccccagctatccgtggtctcaccgtggcctcctctcttccttggaccacaccagcatccggaggggtttccaggtatataagcaggtgtgcgcctcctgccacagcatggacttcgtggcctaccgccacctggtgggcgtgtgctacacggaggatgaagctaaggagctggctgcggaggtggaggttcaagacggccccaatgaagatggggagatgttcatgcggccagggaagctgttcgactatttcccaaaaccataccccaacagtgaggctgctcgagctgccaacaacggagcattgccccctgacctcagctacatcgtgcgagctaggcatggtggtgaggactacgtcttctccctgctcacgggctactgcgagccacccaccggggtgtcactgcgggaaggtctctacttcaacccctactttcctggccaggccattgccatggcccctcccatctacacagatgtcttagagtttgacgatggcaccccagctaccatgtcccagatagccaaggatgtgtgcaccttcctgcgctgggcatctgagccagagcacgaccatcgaaaacgcatggggctcaagatgttgatgatgatggctctgctggtgcccctggtctacaccataaagcggcacaagtggtcagtcctgaagagtcggaagctggcatatcggccgcccaagtgaccctgtccagtgtctgcttgccatcctgccagaacaggccctcaagcccaagagccatcccaggcctgttcaggctcagctaagcctctcttcatctggaagaagaggcaagggggcaggagaccaggctctagctctgggccctccttcagcccccatcatgggaataaattaattttctcaatgt

SEQ ID NO: 91 - DNA, 2036 bp, Homo sapiens
ccggccctcgccctgtccgccgccaccgccgccgccgccagagtcgccatgcagatcccgcgcgccgctcttctcccgctgctgctgctgctgctggcggcgcccgcctcggcgcagctgtcccgggccggccgctcggcgcctttggccgccgggtgcccagaccgctgcgagccggcgcgctgcccgccgcagccggagcactgcgagggcggccgggcccgggacgcgtgcggctgctgcgaggtgtgcggcgcgcccgagggcgccgcgtgcggcctgcaggagggcccgtgcggcgaggggctgcagtgcgtggtgcccttcggggtgccagcctcggccacggtgcggcggcgcgcgcaggccggcctctgtgtgtgcgccagcagcgagccggtgtgcggcagcgacgccaacacctacgccaacctgtgccagctgcgcgccgccagccgccgctccgagaggctgcaccggccgccggtcatcgtcctgcagcgcggagcctgcggccaagggcaggaagatcccaacagtttgcgccataaatataactttatcgcggacgtggtggagaagatcgcccctgccgtggttcatatcgaattgtttcgcaagcttccgttttctaaacgagaggtgccggtggctagtgggtctgggtttattgtgtcggaagatggactgatcgtgacaaatgcccacgtggtgaccaacaagcaccgggtcaaagttgagctgaagaacggtgccacttacgaagccaaaatcaaggatgtggatgagaaagcagacatcgcactcatcaaaattgaccaccagggcaagctgcctgtcctgctgcttggccgctcctcagagctgcggccgggagagttcgtggtcgccatcggaagcccgttttcccttcaaaacacagtcaccaccgggatcgtgagcaccacccagcgaggcggcaaagagctggggctccgcaactcagacatggactacatccagaccgacgccatcatcaactatggaaactcgggaggcccgttagtaaacctggacggtgaagtgattggaattaacactttgaaagtgacagctggaatctcctttgcaatcccatctgataagattaaaaagttcctcacggagtcccatgaccgacaggccaaaggaaaagccatcaccaagaagaagtatattggtatccgaatgatgtcactcacgtccagcaaagccaaagagctgaaggaccggcaccgggacttcccagacgtgatctcaggagcgtatataattgaagtaattcctgataccccagcagaagctggtggtctcaaggaaaacgacgtcataatcagcatcaatggacagtccgtggtctccgccaatgatgtcagcgacgtcattaaaagggaaagcaccctgaacatggtggtccgcaggggtaatgaagatatcatgatcacagtgattcccgaagaaattgacccataggcagaggcatgagctggacttcatgtttccctcaaagactctcccgtggatgacggatgaggactctgggctgctggaataggacactcaagacttttgactgccattttgtttgttcagtggagactccctggccaacagaatccttcttgatagtttgcaggcaaaacaaatgtaatgttgcagatccgcaggcagaagctctgcccttctgtatcctatgtatgcagtgtgctttttcttgccagcttgggccattcttgcttagacagtcagcatttgtctcctcctttaactgagtcatcatcttagtccaactaatgcagtcgatacaatgcgtagatagaagaagccccacgggagccaggatgggactggtcgtgtttgtgcttttctccaagtcagcacccaaaggtcaatgcacagagaccccgggtgggtgagcgctggcttctcaaacggccgaagttgcctcttttaggaatctctttggaattgggagcacgatgactctgagtttgagctattaaagtacttcttacaaa

SEQ ID NO: 92 - DNA, 1887 bp, Homo sapiens
gcgcacggcctgtccgctgcacaccagcttgttggcgtcttcgtcgccgcgctcgccccgggctactcctgcgcgccacaatgagctcccgcatcgccagggcgctcgccttagtcgtcacccttctccacttgaccaggctggcgctctccacctgccccgctgcctgccactgccccctggaggcgcccaagtgcgcgccgggagtcgggctggtccgggacggctgcggctgctgtaaggtctgcgccaagcagctcaacgaggactgcagcaaaacgcagccctgcgaccacaccaaggggctggaatgcaacttcggcgccagctccaccgctctgaaggggatctgcagagctcagtcagagggcagaccctgtgaatataactccagaatctaccaaaacggggaaagtttccagcccaactgtaaacatcagtgcacatgtattgatggcgccgtgggctgcattcctctgtgtccccaagaactatctctccccaacttgggctgtcccaaccctcggctggtcaaagttaccgggcagtgctgcgaggagtgggtctgtgacgaggatagtatcaaggaccccatggaggaccaggacggcctccttggtaaggagctgggattcgatgcctccgaggtggagttgacgagaaacaatgaattgattgcagttggaaaaggcagctcactgaagcggatccctgtttttggaatggagcctcgcatccgatacaaccctttacaaggccagaaatgtattgttcaaacaacttcatggtcccagtgctcaaagacctgtggaactggtatctccacacgagttaccaatgacaaccctgagtgccgccttgtgaaagaaacccggatttgtgaggtgcggccttgtggacagccagtgtacagcagcctgaaaaagggcaagaaatgcagcaagaccaagaaatcccccgaaccagtcaggtttacttacgctggatgtttgagtgtgaagaaataccggcccaagtactgcggttcctgcgtggacggccgatgctgcacgccccagctgaccaggactgtgaagatgcggttccgctgcgaagatggggagacattttccaagaacgtcatgatgatccagtcctgcaaatgcaactacaactgcccgcatgccaatgaagcagcgtttcccttctacaggctgttcaatgacattcacaaatttagggactaaatgctacctgggtttccagggcacacctagacaaacaagggagaagagtgtcagaatcagaatcatggagaaaatgggcgggggtggtgtgggtgatgggactcattgtagaaaggaagccttgctcattcttgaggagcattaaggtatttcgaaactgccaagggtgctggtgcggatggacactaatgcagccacgattggagaatactttgcttcatagtattggagcacatgttactgcttcattttggagcttgtggagttgatgactttctgttttctgtttgtaaattatttgctaagcatattttctctaggcttttttccttttggggttctacagtcgtaaaagagataataagattagttggacagtttaaagcttttattcgtcctttgacaaaagtaaatgggagggcattccatcccttcctgaagggggacactccatgagtgtctgtgagaggcagctatctgcactctaaactgcaaacagaaatcaggtgttttaagactgaatgttttatttatcaaaatgtagcttttggggagggaggggaaatgtaatactggaataatttgtaaatgattttaattttatattcagtgaaaagattttatttatggaattaaccatttaataaagaaatatttacct

SEQ ID NO: 93 - DNA, 5843 bp, Homo sapiens
  modified_base (72)..(75): a, c, g, t, unknown, or other
  modified_base (78)..(89): a, c, g, t, unknown, or other
  modified_base (4902)..(4902): a, c, g, t, unknown, or other
  modified_base (4919)..(4919): a, c, g, t, unknown, or other
  modified_base (4930)..(4930): a, c, g, t, unknown, or other
  modified_base (4946)..(4946): a, c, g, t, unknown, or other
  modified_base (5723)..(5733): a, c, g, t, unknown, or other
  modified_base (5735)..(5737): a, c, g, t, unknown, or other
  modified_base (5740)..(5742): a, c, g, t, unknown, or other
ctaaccgacgcgcgtctgtggagaagcggcttggtcgggggtggtctcgtggggtcctgcctgtttagtcgnnnncannnnnnnnnnnncccttcacgaccgtcaccatggaagtgtcaccattgcagcctgtaaatgaaaatatgcaagtcaacaaaataaagaaaaatgaagatgctaagaaaagactgtctgttgaaagaatctatcaaaagaaaacacaattggaacatattttgctccgcccagacacctacattggttctgtggaattagtgacccagcaaatgtgggtttacgatgaagatgttggcattaactatagggaagtcacttttgttcctggtttgtacaaaatctttgatgagattctagttaatgctgcggacaacaaacaaagggacccaaaaatgtcttgtattagagtcacaattgatccggaaaacaatttaattagtatatggaataatggaaaaggtattcctgttgttgaacacaaagttgaaaagatgtatgtcccagctctcatatttggacagctcctaacttctagtaactatgatgatgatgaaaagaaagtgacaggtggtcgaaatggctatggagccaaattgtgtaacatattcagtaccaaatttactgtggaaacagccagtagagaatacaagaaaatgttcaaacagacatggatggataatatgggaagagctggtgagatggaactcaagcccttcaatggagaagattatacatgtatcacctttcagcctgatttgtctaagtttaaaatgcaaagcctggacaaagatattgttgcactaatggtcagaagagcatatgatattgctggatccaccaaagatgtcaaagtctttcttaatggaaataaactgccagtaaaaggatttcgtagttatgtggacatgtatttgaaggacaagttggatgaaactggtaactccttgaaagtaatacatgaacaagtaaaccacaggtgggaagtgtgtttaactatgagtgaaaaaggctttcagcaaattagctttgtcaacagcattgctacatccaagggtggcagacatgttgattatgtagctgatcagattgtgactaaacttgttgatgttgtgaagaagaagaacaagggtggtgttgcagtaaaagcacatcaggtgaaaaatcacatgtggatttttgtaaatgccttaattgaaaacccaacctttgactctcagacaaaagaaaacatgactttacaacccaagagctttggatcaacatgccaattgagtgaaaaatttatcaaagctgccattggctgtggtattgtagaaagcatactaaactgggtgaagtttaaggcccaagtccagttaaacaagaagtgttcagctgtaaaacataatagaatcaagggaattcccaaactcgatgatgccaatgatgcagggggccgaaactccactgagtgtacgcttatcctgactgagggagattcagccaaaactttggctgtttcaggccttggtgtggttgggagagacaaatatggggttttccctcttagaggaaaaatactcaatgttcgagaagcttctcataagcagatcatggaaaatgctgagattaacaatatcatcaagattgtgggtcttcagtacaagaaaaactatgaagatgaagattcattgaagacgcttcgttatgggaagataatgattatgacagatcaggaccaagatggttcccacatcaaaggcttgctgattaattttatccatcacaactggccctctcttctgcgacatcgttttctggaggaatttatcactcccattgtaaaggtatctaaaaacaagcaagaaatggcattttacagccttcctgaatttgaagagtggaagagttctactccaaatcataaaaaatggaaagtcaaatattacaaaggtttgggcaccagcacatcaaaggaagctaaagaatactttgcagatatgaaaagacatcgtatccagttcaaatattctggtcctgaagatgatgctgctatcagcctggcctttagcaaaaaacagatagatgatcgaaaggaatggttaactaatttcatggaggatagaagacaacgaaagttacttgggcttcctgaggattacttgtatggacaaactaccacatatctgacatataatgacttcatcaacaaggaacttatcttgttctcaaattctgataacgagagatctatcccttctatggtggatggtttgaaaccaggtcagagaaaggttttgtttacttgcttcaaacggaatgacaagcgagaagtaaaggttgcccaattagctggatcagtggctgaaatgtcttcttatcatcatggtgagatgtcactaatgatgaccattatcaatttggctcagaattttgtgggtagcaataatctaaacctcttgcagcccattggtcagtttggtaccaggctacatggtggcaaggattctgctagtccacgatacatctttacaatgctcagctctttggctcgattgttatttccaccaaaagatgatcacacgttgaagtttttatatgatgacaaccagcgtgttgagcctgaatggtacattcctattattcccatggtgctgataaatggtgctgaaggaatcggtactgggtggtcctgcaaaatccccaactttgatgtgcgtgaaattgtaaataacatcaggcgtttgatggatggagaagaacctttgccaatgcttccaagttacaagaacttcaagggtactattgaagaactggctccaaatcaatatgtgattagtggtgaagtagctattcttaattctacaaccattgaaatctcagagcttcccgtcagaacatggacccagacatacaaagaacaagttctagaacccatgttgaatggcaccgagaagacacctcctctcataacagactatagggaataccatacagataccactgtgaaatttgttgtgaagatgactgaagaaaaactggcagaggcagagagagttggactacacaaagtcttcaaactccaaactagtctcacatgcaactctatggtgctttttgaccacgtaggctgtttaaagaaatatgacacggtgttggatattctaagagacttttttgaactcagacttaaatattatggattaagaaaagaatggctcctaggaatgcttggtgctgaatctgctaaactgaataatcaggctcgctttatcttagagaaaatagatggcaaaataatcattgaaaataagcctaagaaagaattaattaaagttctgattcagaggggatatgattcggatcctgtgaaggcctggaaagaagcccagcaaaaggttccagatgaagaagaaaatgaagagagtgacaacgaaaaggaaactgaaaagagtgactccgtaacagattctggaccaaccttcaactatcttcttgatatgcccctttggtatttaaccaaggaaaagaaagatgaactctgcaggctaagaaatgaaaaagaacaagagctggacacattaaaaagaaagagtccatcagatttgtggaaagaagacttggctacatttattgaagaattggaggctgttgaagccaaggaaaaacaagatgaacaagtcggacttcctgggaaaggggggaaggccaaggggaaaaaaacacaaatggctgaagttttgccttctccgcgtggtcaaagagtcattccacgaataaccatagaaatgaaagcagaggcagaaaagaaaaataaaaagaaaattaagaatgaaaatactgaaggaagccctcaagaagatggtgtggaactagaaggcctaaaacaaagattagaaaagaaacagaaaagagaaccaggtacaaagacaaagaaacaaactacattggcatttaagccaatcaaaaaaggaaagaagagaaatccctggtctgattcagaatcagataggagcagtgacgaaagtaattttgatgtccctccacgagaaacagagccacggagagcagcaacaaaaacaaaattcacaatggatttggattcagatgaagatttctcagattttgatgaaaaaactgatgatgaagattttgtcccatcagatgctagtccacctaagaccaaaacttccccaaaacttagtaacaaagaactgaaaccacagaaaagtgtcgtgtcagaccttgaagctgatgatgttaagggcagtgtaccactgtcttcaagccctcctgctacacatttcccagatgaaactgaaattacaaacccagttcctaaaaagaatgtgacagtgaagaagacagcagcaaaaagtcagtcttccacctccactaccggtgccaaaaaaagggctgccccaaaaggaactaaaagggatccagctttgaattctggtgtctctcaaaagcctgatcctgccaaaaccaagaatcgccgcaaaaggaagccatccacttctgatgattctgactctaattttgagaaaattgtttcgaaagcagtcacaagcaagaaatccaagggggagagtgatgacttccatatggactttgactcagctgtggctcctcgggcaaaatctgtacgggcaaagaaacctataaagtacctggaagagtcagatgaagatgatctgttttaaaatgtgaggcgattattttaagtaattatcttaccaagcccaagactggttttaaagttacctgaagctcttaacttcctcccctctgaatttagtttggggaaggtgtttttagtacaagacatcaaagtgaagtaaagcccaagtgttctttagctttttataatactgtctaaatagtgaccatctcatgggcatngttttcttctctgcttngtctgtgtttngagtctgctttctttngtctttaaaacctgatttttaagttcttctgaactgtagaaatagctatctgatcacttcagcgtaaagcagtgtgtttattaaccatccactaagctaaaactagagcagtttgatttaaaagtgtcactcttcctccttttctactttcagtagatatgagatagagcataattatctgttttatcttagttttatacataatttaccatcagatagaactttatggttctagtacagatactctactacactcagcctcttatgtgccaagtttttctttaagcaatgagaaattgctcatgttcttcatcttctcaaatcatcagaggccgaagaaaaacactttggctgtgtctataacttgacacagtcaatagaatgaagaaaattagagtagttatgtgattatttcagctcttgacctgtcccctctggctgcctctgagtctgaatctcccaaagagagaaaccaatttctaagaggactggattgcagaagactcggggacaacatttgatccaagatcttaaatgttatattgataaccatgctcagcaatgagctattagattcattttgggaaatctccataatttcaatttgtaaactttgttaagacctgtctacattgttatatgtgtgtgacttgagtaatgttatcaacgtttttgtaaatatttactatgtttttctattagctaaattccaacaattttgtactttaataaaatgttctaaacattgcaaaaaaaaaaaaaaaaaaaaaaaaaaannnnnnnnnnnannnaannncgcctatagtgaatcctattaccattacctggccgcgttttacacctcttgattggaaaaccctgggttaccaacttaatgccttggaaaaatccactttg

SEQ ID NO: 94 - DNA, 2225 bp, Homo sapiens
cgacatggcgcgcgagctgcgggcgctgctgctgtggggccgccgcctgcggcctttgctgcgggcgccggcgctggcggccgtgccgggaggaaaaccaattctgtgtcctcggaggaccacagcccagttgggccccaggcgaaacccagcctggagcttgcaggcaggacgactgttcagcacgcagaccgccgaggacaaggaggaacccctgcactcgattatcagcagcacagagagcgtgcagggttccacttccaaacatgagttccaggccgagacaaagaagcttttggacattgttgcccggtccctgtactcagaaaaagaggtgtttatacgggagctgatctccaatgccagcgatgccttggaaaaactgcgtcacaaactggtgtctgacggccaagcactgccagaaatggagattcacttgcagaccaatgccgagaaaggcaccatcaccatccaggatactggtatcgggatgacacaggaagagctggtgtccaacctggggacgattgccagatcggggtcaaaggccttcctggatgctctgcagaaccaggctgaggccagcagcaagatcatcggccagtttggagtgggtttctactcagctttcatggtggctgacagagtggaggtctattcccgctcggcagccccggggagcctgggttaccagtggctttcagatggttctggagtgtttgaaatcgccgaagcttcgggagttagaaccgggacaaaaatcatcatccacctgaaatccgactgcaaggagttttccagcgaggcccgggtgcgagatgtggtaacgaagtacagcaacttcgtcagcttccccttgtacttgaatggaaggcggatgaacaccttgcaggccatctggatgatggaccccaaggatgtcggtgagtggcaacatgaggagttctaccgctacgtcgcgcaggctcacgacaagccccgctacaccctgcactataagacggacgcaccgctcaacatccgcagcatcttctacgtgcccgacatgaaaccgtccatgtttgatgtgagccgggagctgggctccagcgttgcactgtacagccgcaaagtcctcatccagaccaaggccacggacatcctgcccaagtggctgcgcttcatccgaggtgtggtggacagtgaggacattcccctgaacctcagccgggagctgctgcaggagagcgcactcatcaggaaactccgggacgttttacagcagaggctgatcaaattcttcattgaccagagtaaaaaagatgctgagaagtatgcaaagttttttgaagattacggcctgttcatgcgggagggcattgtgaccgccaccgagcaggaggtcaaggaggacatagcaaagctgctgcgctacgagtcctcggcgctgccctccgggcagctaaccagcctctcagaatacgccagccgcatgcgggccggcacccgcaacatctactacctgtgcgcccccaaccgtcacctggcagagcactcaccctactatgaggccatgaagaagaaagacacagaggttctcttctgctttgagcagtttgatgagctcaccctgctgcaccttcgtgagtttgacaagaagaagctgatctctgtggagacggacatagtcgtggatcactacaaggaggagaagtttgaggacaggtccccagccgccgagtgcctatcagagaaggagacggaggagctcatggcctggatgagaaatgtgctggggtcgcgtgtcaccaacgtgaaggtgaccctccgactggacacccaccctgccatggtcaccgtgctggagatgggggctgcccgccacttcctgcgcatgcagcagctggccaagacccaggaggagcgcgcacagctcctgcagcccacgctggagatcaaccccaggcacgcgctcatcaagaagctgaatcagctgcgcgcaagcgagcctggcctggctcagctgctggtggatcagatatacgagaacgccatgattgctgctggacttgttgacgaccctagggccatggtgggccgcttgaatgagctgcttgtcaaggccctggagcgacactgacagccagggggccagaaggactgacaccacagatgacagccccacctccttgagctttatttacctaaatttaaaggtatttcttaacccgaaaaaaaaaaaaaaa

SEQ ID NO: 95 - DNA, 2744 bp, Homo sapiens
  modified_base (53)..(54): a, c, g, t, unknown, or other
  modified_base (883)..(883): a, c, g, t, unknown, or other
  modified_base (1020)..(1020): a, c, g, t, unknown, or other
  modified_base (2552)..(2552): a, c, g, t, unknown, or other
  modified_base (2556)..(2556): a, c, g, t, unknown, or other
  modified_base (2558)..(2558): a, c, g, t, unknown, or other
  modified_base (2560)..(2564): a, c, g, t, unknown, or other
  modified_base (2566)..(2571): a, c, g, t, unknown, or other
  modified_base (2574)..(2576): a, c, g, t, unknown, or other
ttttttttttttttttttttttttttttttttttttttttttttttttttttnngcctgaaacaagtcttcatttattgactacagtacagtgatttcgcatcttagctggtaatcaaagatggttatgtattaagtaagagaagacatagtctctcttccaggtatcacctgtcagaaacctgggcaaatttaattttaagaactagaactgcatctcctggtggcagtcgtcaccctgagaacaggaacaaggcaaagaaagcatacaggattttgattctcctacacaggtgcacataaagttagtttattaatgactatattttgaagccagccattttgtccaatatttaaataacaagctgtttaatattaaagcagaaagtactgccacattgtgacagaagtacagctttatccataaacccttcacacaattatacattaaatgctatttttatttaagcaaggcacccctacttgttctaaaatatgggatgtactactccatttaaaaagcaaatgaggagactgatttttttcctatctagagctggtttaaattcaagtgaagccattaattttcttaccagtctggactgttctgacatgtcacttcacagttttgagactaacaaacacccttaggtctaccccaaaccaaaaaaagccagggagggacagtttagacaacttttaagttaagactagaatgcccccttaagtagataggcaccaccgttatacgcctttagcacaaggcttagaaaggcaaaacatttctaaagacataaaaccgccaaattgtcatttacactaagctgtggtattttttgttttgatttttaaaaattcctatctctaagtaatcaaatacagcnaaatttaaaactattctgccaaaccataccagttcaaaggtctgaaaccgttctttgctttggtgaatgtttggttaaaataaatcactgtttcactccatgagaagttttacatcagagcactcaattcacaggcnaaaaaaaaaaagttactttttaaatgaaagcgtttaaagaacactgctgaataaaaatatgtggtctttacaatgagtaacatatcatctatgaaaacaaaccatttaatcatataaaacaaagaccatatttttaaatcagatcctggacagtttaaacaaaaattttaatttgtggtttatttcataatcccaaactggatctttcatttcttcttctaaacagtccactatgaaacttttcttagaagcaattaacccaaaacaccaaaatcatttccctagcagttgctgctaataaactggaactgtatatcccaagtccaagaaagatgtgcaaatgaaatgcttcttgcttcacccttattatctggagcccctagagtcttattttccttttggacatgaattcaggaacagttcaatatacctatgatgaacgtgggaccgatccttgagcatcgctgcaacagcatcctcatgggtctcaaagtgcacatcagcttctccagtggccttcccactggagctgtattccatggtgattctaacaggcttgagtggagcaaaaaagtttataatgtcttgggcattggcttggaaaggtaatcctctcatgtggacaaaatgcagagaagacgtagttccaaaatcagcagcctctggaagcttttctggcacctccttaggcaattctatttccttctcactttcaaaagctgtcatgggttgaatatacctcatttacttcatgttcttcaaagaccatttctggctcagttatatacttagcagtaggaaaagatgcgattttctttcccttataagaaccgacatgtgttcgaacttcattccttctgcttggaaatatctcgatgtatcgattaccaatttcttccctgtgtttcaacagggcttggttggccatttctggttcttcaaattgcacataggcttcccctgtttttcgcctccctctatagtccatcacaaaagtaatgtcaactatattcagtcctgcaaagaagtctacaatgtctttctcattgcaactataaggaagtcctctcaaacgaaccacaccatcatttaccacaggcgaagatttgacctgcaagctcttcattaaggcatccacatcttcattgtttatctcatatacttccacataccgctggcccatgtacatgcggtgcttctctaaggctttctgcacatcctgctctgactccatttcaattaaggcatcaccccttcgtttcccatctctgtttaggagaaaatgtattccattctcaccgttgcggattctgcagtctgaaaaaaagttaagcacatcttccatagtgcatgaccagggcagtccttgagctcgaatgagaaagacatcatccacttcctcttctaacttggacggggccaattcatactcagggggtggtggaaggtcttccaggtaagtagttttggactcctggctgtagctgcgcgtcgggacggcggccgccgccgccagcgactgcggcagcagngagncncnnnnngnnnnnnagnnngcggcggagtagaagggcaggcaggcggcgccggtgcgccggcagctgctgcagttacagccgcagccccggagcagcgccccgagtacccagcgcgtgccggccatggactccggaggcggcgcagggcctgaaggcagctgctccagcagcgatggtgctcgtgcc

SEQ ID NO: 96 - DNA, 1746 bp, Homo sapiens
gagcctgacttcagcgctcccactctcggccgacacccctcatggccaaccgttacaccatggatctgactgccatctacgagagcctcctgtcgctgagccctgacgtgcccgtgccatccgaccatggagggactgagtccagcccaggctggggctcctcgggaccctggagcctgagcccctccgactccagcccgtctggggtcacctcccgcctgcctggccgctccaccagcctagtggagggccgcagctgtggctgggtgcccccaccccctggcttcgcaccgctggctccccgcctgggccctgagctgtcaccctcacccacttcgcccactgcaacctccaccaccccctcgcgctacaagactgagctatgtcggaccttctcagagagtgggcgctgccgctacggggccaagtgccagtttgcccatggcctgggcgagctgcgccaggccaatcgccaccccaaatacaagacggaactctgtcacaagttctacctccagggccgctgcccctacggctctcgctgccacttcatccacaaccctagcgaagacctggcggccccgggccaccctcctgtgcttcgccagagcatcagcttctccggcctgccctctggccgccggacctcaccaccaccaccaggcctggccggcccttccctgtcctccagctccttctcgccctccagctccccaccaccacctggggaccttccactgtcaccctctgccttctctgctgcccctggcacccccctggctcgaagagaccccaccccagtctgttgcccctcctgccgaagggccactcctatcagcgtctgggggcccttgggtggcctggttcggaccccctctgtacagtccctgggatccgaccctgatgaatatgccagcagcggcagcagcctggggggctctgactctcccgtcttcgaggcgggagtttttgcaccaccccagcccgtggcagccccccggcgactccccatcttcaatcgcatctctgtttctgagtgacaaagtgactgcccggtcagatcagctggatctcagcggggagccacgtctcttgcactgtggtctctgcatggaccccagggctgtggggacttgggggacagtaatcaagtaatccccttttccagaatgcattaacccactcccctgacctcacgctggggcaggtccccaagtgtgcaagctcagtattcatgatggtgggggatggagtgtcttccgaggttcttgggggaaaaaaaattgtagcatatttaagggaggcaatgaaccctctcccccacctcttccctgcccaaatctgtctcctagaatcttatgtgctgtgaataataggccttcactgcccctccagtttttatagacctgaggttccagtgtctcctggtaactggaacctctcctgagggggaatcctggtgctcaaattaccctccaaaagcaagtagccaaagccgttgccaaaccccacccataaatcaatgggccctttatttatgacgactttatttattctaatatgattttatagtatttatatatattgggtcgtctgcttcccttgtatttttcttcctttttttgtaatattgaaaacgacgatataattattataagtagactataatatatttagtaatatatattattaccttaaaagtctatttttgtgttttgggcatttttaaataaacaatctgagtgt

SEQ ID NO: 97 - DNA, 7560 bp, Homo sapiens
accggccacagcctgcctactgtcacccgcctctcccgcgcgcagatacacgcccccgcctccgtgggcacaaaggcagcgctgctggggaactcgggggaacgcgcacgtgggaaccgccgcagctccacactccaggtacttcttccaaggacctaggtctctcgcccatcggaaagaaaataattctttcaagaagatcagggacaactgatttgaagtctactctgtgcttctaaatccccaattctgctgaaagtgaatccctagagccctagagccccagcagcacccagccaaacccacctccaccatgggggccatgactcagctgttggcaggtgtctttcttgctttccttgccctcgctaccgaaggtggggtcctcaagaaagtcatccggcacaagcgacagagtggggtgaacgccaccctgccagaagagaaccagccagtggtgtttaaccacgtttacaacatcaagctgccagtgggatcccagtgttcggtggatctggagtcagccagtggggagaaagacctggcaccgccttcagagcccagcgaaagctttcaggagcacacagtagatggggaaaaccagattgtcttcacacatcgcatcaacatcccccgccgggcctgtggctgtgccgcagcccctgatgttaaggagctgctgagcagactggaggagctggagaacctggtgtcttccctgagggagcaatgtactgcaggagcaggctgctgtctccagcctgccacaggccgcttggacaccaggcccttctgtagcggtcggggcaacttcagcactgaaggatgtggctgtgtctgcgaacctggctggaaaggccccaactgctctgagcccgaatgtccaggcaactgtcaccttcgaggccggtgcattgatgggcagtgcatctgtgacgacggcttcacgggcgaggactgcagccagctggcttgccccagcgactgcaatgaccagggcaagtgcgtgaatggagtctgcatctgtttcgaaggctacgccggggctgactgcagccgtgaaatctgcccagtgccctgcagtgaggagcacggcacatgtgtagatggcttgtgtgtgtgccacgatggctttgcaggcgatgactgcaacaagcctctgtgtctcaacaattgctacaaccgtggacgatgcgtggagaatgagtgcgtgtgtgatgagggtttcacgggcgaagactgcagtgagctcatctgccccaatgactgcttcgaccggggccgctgcatcaatggcacctgctactgcgaagaaggcttcacaggtgaagactgcgggaaacccacctgcccacatgcctgccacacccagggccggtgtgaggaggggcagtgtgtatgtgatgagggctttgccggtttggactgcagcgagaagaggtgtcctgctgactgtcacaatcgtggccgctgtgtagacgggcggtgtgagtgtgatgatggtttcactggagctgactgtggggagctcaagtgtcccaatggctgcagtggccatggccgctgtgtcaatgggcagtgtgtgtgtgatgagggctatactggggaggactgcagccagctacggtgccccaatgactgtcacagtcggggccgctgtgtcgagggcaaatgtgtatgtgagcaaggcttcaagggctatgactgcagtgacatgagctgccctaatgactgtcaccagcacggccgctgtgtgaatggcatgtgtgtttgtgatgacggctacacaggggaagactgccgggatcgccaatgccccagggactgcagcaacaggggcctctgtgtggacggacagtgcgtctgtgaggacggcttcaccggccctgactgtgcagaactctcctgtccaaatgactgccatggccagggtcgctgtgtgaatgggcagtgcgtgtgccatgaaggatttatgggcaaagactgcaaggagcaaagatgtcccagtgactgtcatggccagggccgctgcgtggacggccagtgcatctgccacgagggcttcacaggcctggactgtggccagcactcctgccccagtgactgcaacaacttaggacaatgcgtctcgggccgctgcatctgcaacgagggctacagcggagaagactgctcagaggtgtctcctcccaaagacctcgttgtgacagaagtgacggaagagacggtcaacctggcctgggacaatgagatgcgggtcacagagtaccttgtcgtgtacacgcccacccacgagggtggtctggaaatgcagttccgtgtgcctggggaccagacgtccaccatcatccaggagctggagcctggtgtggagtactttatccgtgtatttgccatcctggagaacaagaagagcattcctgtcagcgccagggtggccacgtacttacctgcacctgaaggcctgaaattcaagtccatcaaggagacatctgtggaagtggagtgggatcctctagacattgcttttgaaacctgggagatcatcttccggaatatgaataaagaagatgagggagagatcaccaaaagcctgaggaggccagagacctcttaccggcaaactggtctagctcctgggcaagagtatgagatatctctgcacatagtgaaaaacaatacccggggccctggcctgaagagggtgaccaccacacgcttggatgcccccagccagatcgaggtgaaagatgtcacagacaccactgccttgatcacctggttcaagcccctggctgagatcgatggcattgagctgacctacggcatcaaagacgtgccaggagaccgtaccaccatcgatctcacagaggacgagaaccagtactccatcgggaacctgaagcctgacactgagtacgaggtgtccctcatctcccgcagaggtgacatgtcaagcaacccagccaaagagaccttcacaacaggcctcgatgctcccaggaatcttcgacgtgtttcccagacagataacagcatcaccctggaatggaggaatggcaaggcagctattgacagttacagaattaagtatgcccccatctctggaggggaccacgctgaggttgatgttccaaagagccaacaagccacaaccaaaaccacactcacaggtctgaggccgggaactgaatatgggattggagtttctgctgtgaaggaagacaaggagagcaatccagcgaccatcaacgcagccacagagttggacacgcccaaggaccttcaggtttctgaaactgcagagaccagcctgaccctgctctggaagacaccgttggccaaatttgaccgctaccgcctcaattacagtctccccacaggccagtgggtgggagtgcagcttccaagaaacaccacttcctatgtcctgagaggcctggaaccaggacaggagtacaatgtcctcctgacagccgagaaaggcagacacaagagcaagcccgcacgtgtgaaggcatccactgaacaagcccctgagctggaaaacctcaccgtgactgaggttggctgggatggcctcagactcaactggaccgcggctgaccaggcctatgagcactttatcattcaggtgcaggaggccaacaaggtggaggcagctcggaacctcaccgtgcctggcagccttcgggctgtggacataccgggcctcaaggctgctacgccttatacagtctccatctatggggtgatccagggctatagaacaccagtgctctctgctgaggcctccacaggggaaactcccaatttgggagaggtcgtggtggccgaggtgggctgggatgccctcaaactcaactggactgctccagaaggggcctatgagtactttttcattcaggtgcaggaggctgacacagtagaggcagcccagaacctcaccgtcccaggaggactgaggtccacagacctgcctgggctcaaagcagccactcattataccatcaccatccgcggggtcactcaggacttcagcacaacccctctctctgttgaagtcttgacagaggaggttccagatatgggaaacctcacagtgaccgaggttagctgggatgctctcagactgaactggaccacgccagatggaacctatgaccagtttactattcaggtccaggaggctgaccaggtggaagaggctcacaatctcacggttcctggcagcctgcgttccatggaaatcccaggcctcagggctggcactccttacacagtcaccctgcacggcgaggtcaggggccacagcactcgaccccttgctgtagaggtcgtcacagaggatctcccacagctgggagatttagccgtgtctgaggttggctgggatggcctcagactcaactggaccgcagctgacaatgcctatgagcactttgtcattcaggtgcaggaggtcaacaaagtggaggcagcccagaacctcacgttgcctggcagcctcagggctgtggacatcccgggcctcgaggctgccacgccttatagagtctccatctatggggtgatccggggctatagaacaccagtactctctgctgaggcctccacagccaaagaacctgaaattggaaacttaaatgtttctgacataactcccgagagcttcaatctctcctggatggctaccgatgggatcttcgagacctttaccattgaaattattgattccaataggttgctggagactgtggaatataatatctctggtgctgaacgaactgcccatatctcagggctaccccctagtactgattttattgtctacctctctggacttgctcccagcatccggaccaaaaccatcagtgccacagccacgacagaggccctgccccttctggaaaacctaaccatttccgacattaatccctacgggttcacagtttcctggatggcatcggagaatgcctttgacagctttctagtaacggtggtggattctgggaagctgctggacccccaggaattcacactttcaggaacccagaggaagctggagcttagaggcctcataactggcattggctatgaggttatggtctctggcttcacccaagggcatcaaaccaagcccttgagggctgagattgttacagaagccgaaccggaagttgacaaccttctggtttcagatgccaccccagacggtttccgtctgtcctggacagctgatgaaggggtcttcgacaattttgttctcaaaatcagagataccaaaaagcagtctgagccactggaaataaccctacttgcccccgaacgtaccagggacttaacaggtctcagagaggctactgaatacgaaattgaactctatggaataagcaaaggaaggcgatcccagacagtcagtgctatagcaacaacagccatgggctccccaaaggaagtcattttctcagacatcactgaaaattcggctactgtcagctggagggcacccacggcccaagtggagagcttccggattacctatgtgcccattacaggaggtacaccctccatggtaactgtggacggaaccaagactcagaccaggctggtgaaactcatacctggcgtggagtaccttgtcagcatcatcgccatgaagggctttgaggaaagtgaacctgtctcagggtcattcaccacagctctggatggcccatctggcctggtgacagccaacatcactgactcagaagccttggccaggtggcagccagccattgccactgtggacagttatgtcatctcctacacaggcgagaaagtgccagaaattacacgcacggtgtccgggaacacagtggagtatgctctgaccgacctcgagcctgccacggaatacacactgagaatctttgcagagaaagggccccagaagagctcaaccatcactgccaagttcacaacagacctcgattctccaagagacttgactgctactgaggttcagtcggaaactgccctccttacctggcgacccccccgggcatcagtcaccggttacctgctggtctatgaatcagtggatggcacagtcaaggaagtcattgtgggtccagataccacctcctacagcctggcagacctgagcccatccacccactacacagccaagatccaggcactcaatgggcccctgaggagcaatatgatccagaccatcttcaccacaattggactcctgtaccccttccccaaggactgctcccaagcaatgctgaatggagacacgacctctggcctctacaccatttatctgaatggtgataaggctcaggcgctggaagtcttctgtgacatgacctctgatgggggtggatggattgtgttcctgagacgcaaaaacggacgcgagaacttctaccaaaactggaaggcatatgctgctggatttggggaccgcagagaagaattctggcttgggctggacaacctgaacaaaatcacagcccaggggcagtacgagctccgggtggacctgcgggaccatggggagacagcctttgctgtctatgacaagttcagcgtgggagatgccaagactcgctacaagctgaaggtggaggggtacagtgggacagcaggtgactccatggcctaccacaatggcagatccttctccacctttgacaaggacacagattcagccatcaccaactgtgctctgtcctacaaaggggctttctggtacaggaactgtcaccgtgtcaacctgatggggagatatggggacaataaccacagtcagggcgttaactggttccactggaagggccacgaacactcaatccagtttgctgagatgaagctgagaccaagcaacttcagaaatcttgaaggcaggcgcaaacgggcataaattggagggaccactgggtgagagaggaataaggcggcccagagcgaggaaaggattttaccaaagcatcaatacaaccagcccaaccatcggtccacacctgggcatttggtgagaatcaaagctgaccatggatccctggggccaacggcaacagcatgggcctcacctcctctgtgatttctttctttgcaccaaagacatcagtctccaacatgtttctgttttgttgtttgattcagcaaaaatctcccagtgacaacatcgcaatagttttttacttctcttaggtggctctgggatgggagaggggtaggatgtacaggggtagtttgttttagaaccagccgtattttacatgaagctgtataattaattgtcattatttttgttagcaaagattaaatgtgtcattggaagccatccctttttttacatttcatacaacagaaaccagaaaagcaatactgtttccattttaaggatatgattaatattattaatataataatgatgatgatgatgatgaaaactaaggatttttcaagagatctttctttccaaaacatttctggacagtacctgattgtattttttttttaaataaaagcacaagtacttttgaaaaaaaaccggaattc

SEQ ID NO: 98 - DNA, 1418 bp, Homo sapiens
aactgtgcgaaccagacccggcagccttgctcagttcagcatagcggagcggatccgatcggatcggagcacaccggagcaggctcatcgagaaggcgtctgcgagaccatggagaacggatacacctatgaagattataagaacactgcagaatggcttctgtctcatactaagcaccgacctcaagttgcaataatctgtggttctggattaggaggtctgactgataaattaactcaggcccagatctttgactacagtgaaatccccaactttcctcgaagtacagtgccaggtcatgctggccgactggtgtttgggttcctgaatggcagggcctgtgtgatgatgcagggcaggttccacatgtatgaagggtacccactctggaaggtgacattcccagtgagggttttccaccttctgggtgtggacaccctggtagtcaccaatgcagcaggagggctgaaccccaagtttgaggttggagatatcatgctgatccgtgaccatatcaacctacctggtttcagtggtcagaaccctctcagagggcccaatgatgaaaggtttggagatcgtttccctgccatgtctgatgcctacgaccggactatgaggcagagggctctcagtacctggaaacaaatgggggagcaacgtgagctacaggaaggcacctatgtgatggtggcaggccccagctttgagactgtggcagaatgtcgtgtgctgcagaagctgggagcagacgctgttggcatgagtacagtaccagaagttatcgttgcacggcactgtggacttcgagtctttggcttctcactcatcactaacaaggtcatcatggattatgaaagcctggagaaggccaaccatgaagaagtcttagcagctggcaaacaagctgcacagaaattggaacagtttgtctccattcttatggccagcattccactccctgacaaagccagttgacctgccttggagtcgtctggcatctcccacacaagacccaagtagctgctaccttctttggccccttgctggagtcatgtgcctctgtccttaggttgtagcagaaaggaaaagattcctgtccttcacctttcccactttcttctaccagacccttctggtgccagatcctcttctcaaagctgggattacaggtgtgagcatagtgagaccttggcgctacaaaataaagctgttctcattcctgttctttcttacacaagagctggagcccgtgccctaccacacatctgtggagatgcccaggatttgactcgggccttagaactttgcatagcagctgctactagctctttgagataatacattccgaggggctcagttctgccttatctaaatcaccagagaccaaacaaggactaatccaatacctcttgga

SEQ ID NO: 99 - DNA, 5515 bp, Homo sapiens
  modified_base (37)..(39): a, c, g, t, unknown, or other
  modified_base (706)..(712): a, c, g, t, unknown, or other
  modified_base (714)..(714): a, c, g, t, unknown, or other
  modified_base (716)..(720): a, c, g, t, unknown, or other
  modified_base (5454)..(5454): a, c, g, t, unknown, or other
ttttttttttttttttttttttttttttttttttttnnnttttaatatgatattttattatgggtgtctgtaaggaaaaaaaagatcaacaaccacatacaagcttacaaagttaaatttcaacacattctctatgctagtgtgacaaaagcagccccataatttggtttttattgttgacctttacaggatgaaggaggagaatcccctgtggcatgccaatgaatctttctgatgggagacatgtacagattttgtgcatttatgttctgaatgcaagtcaacaattctgatctagagtttaaaagtgaaagtacattagcaccataacatgcgtctttaaagccttcccaaatattagtaatcttgaccagcaatgacaagaaaaaagaggagcacctttacaagcagttgatatccaatattaaaataattgtggctttaaaaatatttctttaaattcttgcattacacttttctttttaaaccaatcttccaggagattaatcaatgaaatttataagttttatcaacgtataaaatttttttcatcttctgggactcatagaatacaatctgtgtttctgaccagttgaggtagttaaaatagggagggcttttctaatttcgtatttgactatttcagaaagaaaggttatcttttactggtgagcacagtcattgctctgcagatgggctaggattnnnnnnntntnnnnnttttttgttatcataaagagtgttgaagtttatttattatagcaccattgagacattttgaaattggaattggtaaaaaaataaaacaaaaagcatttgaattgtatttggtggaacagcaaaaaaagagaagtatcatttttctttgtcaaattatactgtttccaaacattttggaaataaataactggaattttgtcggtcacttgcactggttgacaagattagaacaagaggaacacatatggagttaaattttttttgttgggatttcagatagagtttggtttataaaaagcaaacagggccaacgtccacaccaaattcttgatcaggaccaccaatgtcatagggtgcaatatctacaataggtagtctcacagccttgcgtgttcgatattcaaagactgttttgctccattccccagtgtgtttcgtgcaaccatcctccagaactgtgtaggtgaatttgctatttccttcagccttgaattcaccttcatttgaccccatcagcttcagggccttctttacatttccactggcctgatccatgtatgcaatgctatttttgcagtgatatgtgatgttctgggaagctcggctggagagaagtcgaaggaatgccagctgcacatcaaggacatcttcaggaagttcaggattgccgtagctaaactgaaaaccaccatccatggactctccaaaccaaacgtgtttcttctcagcactagaatctgtccaccagtgtttccgtggaacattcaaaggattggcacttatgcatgtttccccagtttccatattacagaataccttgatagcatccaatttgcatccttggttagggtcaacccagtattctccactcttgagttcaggatggcagaatttcaggtctctgcagtttctagcggggtttttacgagaaccatcaggactaatgaggctttctatttgtccattaacagacttgagtgaagtcataatctcatcggtgttgattttgaaatccattggttcatctccataatacggggcaaaaccgccagctttttcacctccaatcccagcaatggcagcggctccaacaccaccacagcaaggaccaggggcaccaggaggtccaggagggcctggttgccctgggtggcctggggagccctcagatcctctttcacctctgttacctcgaggccctggtggtccaatgggacctggatgtccactggttccatctttgccaggaggtccactgggtccaacaggtcctctggggcctgcaggtcctggactgccgattgcaccctgctgaccagcagggcctggagaacctggggcacctggattaccagggaatcctcgatgtcctttgatgccagcagctccacgttcacctgtttcacctttgtcaccacgtgggccttgaggaccaggagcacctcgggaaccagcaggaccgggagcaccagcagggccagcagggccactttctcctctgtcaccactctttccagctggaccgacaggaccaggtgggcctggatgaccaggagcgccaggggcaccaggagagccattttcaccacgatcacccttgccaccaggagatccatctcggcctggaagaccatctgatccagggtttccatctcttccaggttcaccagctgtaccagccagaccaggaagaccctggggtccagggggaccacgttctccactgagaccgttagctcctggtttcccactttcacccttgacaccctgagggccagggcttcccctaggacctggcatgcctggtggtcctgcaagaccccgtgctccagtgatcccagcaatcccaagtgggcctggagctcctggtgggccctgggcaccaggcgatcccttctctcctggttggccagcatcaccttttggtccagacactccagggctgccaggagcaccagtgttacccgcaggacctgggggcccatccttgcctggagaaccgctgggacctgggggtcctgggttaccattactaccaggaggaccaggaagaccacgagcaccagggaagccagcagcaccaggtccaccaggactgccacgttcacctttgacaccttggggaccaggaggaccagcaggtccagaacctccagggggtcctgcaactccaggagggcctccttcacctttctcacccggagcccctctttctcctttaccaccaggttcaccattctgtccaggagcaccagggaaaccagcaggtcctggagggccagtttcacctctctcaccagggctaccacgaggtccagctatacctggaagtccgggggcaccaccttcacccttatctccaggctggccagctgggccaggaggaccaataggaccagtaggaccccttgggccatctttccctgggacaccatcagcacctgggccgcctggttcacccttgtcaccctttggaccaggacttccaagacctcctctttctccaggcattccttgcagaccaggagtaccagcagcaccaggtggcccaggaggaccagcagcaccctttcctccttcgggaccagggggaccagctccacctctaagtcctggggcccctgccaatccaggaggtccacgttcaccaggggcaccagcatcacccttgcctcctggagctccaggtgcaccggcatcaccctttggacctggttccccaggttttccattttctcctggaggaccacctgtaccaggcaagccttgtaatccttgtggaccagggggtcctgtgtctcctttgtcaccaccaggcccagtaggccctgggggtccttgaggtccagtttcaccattctttccaggaggaccctgagggccaggtcctccagggccacctcgttctccattcttaccaggagcaccatcatttcctttaggaccggggaagcccatgacaccaggctgacctcggggaccagatggcccaggaggacctggtcgaccactttctccttgacttccgggaggccctggtttcccatcacttcctggtcctcctggacttccgggcatgcccctcattcctggacctccagggacgccatctctgccaggttctccagcagctcctctgggccctgcagggcctggagcaccacgctctccagcaggacccttttctcctgggatgccatttggtccagcaggtcctcggaacccaggggcacccctttctcctgcagctcctggaagcccatttgcaccaggttctccaggtgatccatccttgccatcttcgcctttagctcctggaacacctggaataccagcctcaccgcgttcaccacgtggtccgggctctcctttggcaccattcttaccaggctcacctgcaccacctcgcagtccaggagcaccattagcaccggctggtcctggaggaccccgggctcccatcagtccaggagctccaggaatgccagcgggacccatttcgcctttaccaccaggactaccattaatcccaggagggccaggaggaccttgagcaccagcgtgtccctgaggtccaggttctcctctttgtccaggggcaccatttgaaccaggagaccctgcaggtccaacttcacccttagcaccaggggatccagggaatccggcagttccaggaggaccaggagggcctggttgaccatcactgcctcgagcaccgtcattaccccgagcacctgcagccccaggaagtcctggccgtcctcgctcaccaggagcccctcttggacccatgggtccaggagctccattttcgcctggaagaccattttcaccctttaatccaggagcacctgtttcacccttttctccatttcgtccatcgaagcctctgtgtcctttcataccagggaatccaggtatcccagctggacctttgatacctggaggtccaggcaatcctcgctctccaggtcgtccgggtctacctgattctccatcttttccagcaggaccagatggacctatagcaccaggaggtcctggagggcctgaaggaccagcttgcccaggttcaccagggggtccttggtatcctggagatccaggggaaccaggatgaccagatgtaccagggggaccgggagggcctggggggccagctggtccaggatagcctgcgagtcctcctactgctactccagacttgacatcatatgaatcatactggggagaatagttctgaggaccagtagggcatgattcacagattccaggggggccaggagaaccaggggaccctggttgtcctggaataccagggtcaccatttctcccaggaataccaggagggcctggatctcccttggggccttgaggtccttgaccattaggagggcgagtaggagcagttggaggctgtgggcaaactgcacaacattctccaaatggaatttctgggttggggcagtctaattcttgatcgtcacatattatgtcatcgcagagaacggatcctgagtcacagacacatatttggcatggttctggcttccagacatctctatccgcataggactgaccaagatgggaacatcctccttcaacagcttcctgttgtgccaaaataatagtgggatgaagcagagcgagaagtagccagctccccttttgcacaaagctcatcatgtctaaatatcagacatgagactctttgtgcaaaaaggagaaaanaaaagcagttcaaagtagcaccatcaagttgttccctgcccttcagcaccgggcccgtcat

SEQ ID NO: 100 - DNA, 1998 bp, Homo sapiens
  modified_base (485)..(507): a, c, g, t, unknown, or other
  modified_base (509)..(510): a, c, g, t, unknown, or other
  modified_base (513)..(513): a, c, g, t, unknown, or other
  modified_base (515)..(515): a, c, g, t, unknown, or other
  modified_base (519)..(519): a, c, g, t, unknown, or other
  modified_base (548)..(548): a, c, g, t, unknown, or other
gaattccattcattacggagttagtttctgctaaatacttactgatgctagagcagacccctggcatctgaggatttaagagttcaactgttctcaatctatgctaaaaaaaaaaaaatgacaaataataaattctacatttccgaggcactaatttgaacttcagaagtgggagggctgatatgtaaggcaagttatttaggaatgaggagggctgacagctgtaactcagtgtggttttgcagctgcctacgttagtaccaggtattccataaaactctgtagaggtcatttacatttcgtaaattctgtaattacaccttactgtatcatgccctagtagtttcacaaacttagatattcacaaaaatgttttggaatatattccttgggaatgtgaagggtctcctatattacattaaacaaaaaaccatgcagttacttagagctcatagagctttctcaaaatcaactactgatcatannnnnnnnnnnnnnnnnnnnnnntnnttntntttntggcaggcaaaatttctttttattgtagngcaattacttaaactggaaatttggctttatgcataataagtcatgtgggtaaaacatccacattgcagttaggtttccagtatctagcttttatttattttttagcaatgacattaacaagattttgccaggttataaaaatgagggctttcttgagaattacttatagtttccgagttgaatggcagagcgcacgtagacacatctgaaggtggatggctgtatctcccagtactggaccgggttgctgaaaagactcacacccgaataagaagcctttttggtgttgtgtccaggtgggcagaagtcacttgatccaactacagagatattgttgttatgaaggtagacaacctggatgtacttatgctctgccagcccaccaggtactctggtaagcttgttgttgtccaagtgaagctccctcagatgaggcgtgttggccagagagccattgtcaacagcagagatgctgttgaaactcaatcccaacttagccaaattattcagtcctttcaggctagctgcatcaactctgctgattttgttgccatcaagatgtaattccgtaagggaaggaggaagaccttgaggaatgctggtgatattggtatcagcaatgcggatgtaggagagcttcttcattccctggaaagccccattttcaattcctgagctcttcagcggattggtgcccagttctatgacaatcatctggttcagtccattgaaagtaacttttcgcactttggtgatctcattctcatgggcacgcagctcctgaagagttttgggcattttttctggcaattccttcagctgattcttggacagataaagtcgttccaacttcaccaaaggtgtaaatgctccaggactaactttgctaattttattgttgacaagaatcaatgcgtgaaggttcttcaggttcttaaagtctccatctttgatttcggttattttgttgttttgcaggtctagcagagttgtgtcagggggaagatcctttggcactttgtccagacccaaatcagaacactggaccactcgaagatggcattgacagcggaaggggcacactgggcctagggagggctcgaagtcgcggtcatcaggaacttctgggcctatcccagaagcctcatcttctagcataaagtcaaataagcctctctgttgaaacggtccagcccaggaaacttgtgcaagcagaaggaggatgatagtggccttcatgatttatctcatgtattttcacaaccagggaaccttttaatccgggaatttgccacaggagccctcacgtaagctgagatgtaattacactaaatattcagcccaagtaaaagagtttgcaggtgtggaaaggaggagggggtaggtgctgctctgtgactaggttgaaaacctcctgcttctactccatagcacagttaaaaaataatc

SEQ ID NO: 101 - DNA, 3304 bp, Homo sapiens
gcgaccgaacgcggcggtcggcagcgttcgcgcgggggcctgcgaagcgctgctcggggccggcactgcccgcggggaggacgcgccgccgccgccacccagcgccgccgccgccgccgcctccagccgggccgccgcgcgtcccgggggccggccccgcgagcgcaggagtaaacaccgccggagtcttggagccgctgcagaagggaataaagagagatgcagggatttgtgaggttacggcgccccagctgcaagatgcactagccggctgaacccgggatcggctgacttgttggaaccggagtgctctgcacggagagtggtggatgagttgaagttgccttcccggggctcattttccacgctgccgagaggaatccgagaggcaaggcaatcacttcgtcttgccattgattgggtatcgggagctttttttttctcccctctctctttcttttcctccgtcttgttgcatgcaagaaaattacagtccgctgctcgcccgccctgggtgcgagatattcagccccgctctctcccgtgcattgtgcaacccaaagatgaaagaccgaaggggagaaagttaaagaaatcgcccacatgcgctggatcagtccacggcttggggaaaggcatccagagaaggtgggagcggagagtttgaagtctttacaggcgggaagatggcggactggagctgaaagtgttgattgggaaacttgggtgattcttgtgtttatttacaatcctcttgacccaggcaggacacatgcaggccaaaaaacgctatttcatcctgctctcagctggctcttgtctcgcccttttgttttatttcggaggcttgcagtttagggcatcgaggagccacagccggagagaagaacacagcggtaggaatggcttgcaccaccccagtccggatcatttctggccccgcttcccggagcctctgcgccccttcgttccttgggatcaattggaaaacgaggattccagcgtgcacatttccccccggcagaagcgagatgccaactccagcatctacaaaggcaagaagtgccgcatggagtcctgcttcgatttcaccctttgcaagaaaaacggcttcaaagtctacgtatacccacagcaaaaaggggagaaaatcgccgaaagttaccaaaacattctagcggccatcgagggctccaggttctacacctcggaccccagccaggcgtgcctctttgtcctgagtctggatactttagacagagaccagttgtcacctcagtatgtgcacaatttgagatccaaagtgcagagtctccacttgtggaacaatggtaggaatcatttaatttttaatttatattccggcacttggcctgactacaccgaggacgtggggtttgacatcggccaggcgatgctggccaaagccagcatcagtactgaaaacttccgacccaactttgatgtttctattcccctcttttctaaggatcatcccaggacaggaggggagagggggtttttgaagttcaacaccatccctcctctcaggaagtacatgctggtattcaaggggaagaggtacctgacagggataggatcagacaccaggaatgccttatatcacgtccataacggggaggacgttgtgctcctcaccacctgcaagcatggcaaagactggcaaaagcacaaggattctcgctgtgacagagacaacaccgagtatgagaagtatgattatcgggaaatgctgcacaatgccactttctgtctggttcctcgtggtcgcaggcttgggtccttcagattcctggaggctttgcaggctgcctgcgtccctgtgatgctcagcaatggatgggagttgccattctctgaagtgattaattggaaccaagctgccgtcataggcgatgagagattgttattacagattccttctacaatcaggtctattcatcaggataaaatcctagcacttagacagcagacacaattcttgtgggaggcttatttttcttcagttgagaagattgtattaactacactagagattattcaggacagaatattcaagcacatatcacgtaacagtttaatatggaacaaacatcctggaggattgttcgtactaccacagtattcatcttatctgggagattttccttactactatgctaatttaggtttaaagcccccctccaaattcactgcagtcatccatgcggtgacccccctggtctctcagtcccagccagtgttgaagcttctcgtggctgcagccaagtcccagtactgtgcccagatcatagttctatggaattgtgacaagcccctaccagccaaacaccgctggcctgccactgctgtgcctgtcgtcgtcattgaaggagagagcaaggttatgagcagccgttttctgccctacgacaacatcatcacagacgccgtgctcagccttgacgaggacacggtgctttcaacaacagaggtggatttcgccttcacagtgtggcagagcttccctgagaggattgtggggtaccccgcgcgcagccacttctgggataactctaaggagcggtggggatacacatcaaagtggacgaacgactactccatggtgttgacaggagctgctatttaccacaaatattatcactacctatactcccattacctgccagccagcctgaagaacatggtggaccaattggccaattgtgaggacattctcatgaacttcctggtgtctgctgtgacaaaattgcctccaatcaaagtgacccagaagaagcagtataaggagacaatgatgggacagacttctcgggcttcccgttgggctgaccctgaccactttgcccagcgacagagctgcatgaatacgtttgccagctggtttggctacatgccgctgatccactctcagatgaggctcgaccccgtcctctttaaagaccaggtctctattttgaggaagaaataccgagacattgagcgactttgaggaatccggctgagtgggggaggggaagcaagaagggatgggggtcaagctgctctctcttcccagtgcagatccactcatcagcagagccagattgtgccaactatccaaaaacttagatgagcagaatgacaaaaaaaaaaaaggccaatgagaactcaactcctggctcctgggactgcaccagactgctccaaactcacctcactggcttctgtgtcccaagactaggttggtacagtttaattatggaacattaaataattatttttgaaaaaaaaaaaaaaaaaa

SEQ ID NO: 102 - DNA, 1811 bp, Homo sapiens
ggtttgtgtagagaggcgtgcagagcccgttgtccggagtgcacctgctgcctgttctgtccctcccgggagcccccgccgctgtcgccgtcgagtcgccatggaagtgcagaaagaggcacagcgcatcatgaccctgtcggtgtggaagatgtatcactcccgcatgcagcgcggtggcctgcggctgcaccggagtctgcagctgtcgctggtcatgcgcagcgcccgggagctctacctctcggccaaggtggaggccctcgagcccgaggtgtcgttgccggccgccctcccctctgaccctcgcctgcacccgccccgagaagccgagtccacggccgagacagcgacccccgacggtgagcacccgtttccggagccaatggacacgcaggaggcgccgacagccgaggagacctccgcctgctgtgccccgcgccccgccaaagtcagccgcaaacgacgcagcagcagcctgagcgacggcggggacgttggactggtcccgagcaagaaagcccgtctggaagaaaaggaagaagaggagggagcgtcatccgaagtcgccgatcgcctgcagccccctccgggccaagcggagggcgcctttcccaacctggcccgcgtcctgcagaggcgcttctccggcctcctgaactgcagccccgcggcccctccgacggcgccgcccgcgtgcgaggcaaagcccgcttgccgcccggcggacagcatgctcaacgtgctcgtgcgggccgtggtggccttctgaggaccccgagcggcgctgccggagcccagagcgcgcgtcgaaccgtcggcccgagggcgcagacctgaggcgaggccacccccctccatcctgggggaagcgcccgcgaaaaccgtggagagaagccgccgcccgggctgctgagaggcccggagaggactctgtccccggggagccatcgccttcagtgtgcagggacggcaccgaggagtctgagccgggcgcgggcgccttccgcagagacctgcgcccacaggtgctgtcttagtggactgggacgtgaacctttcgctctccttctggactgggagaagggaggcttgggtgttgtgttttttgttttgtttgtttgtttgtttttaaagatctcctcagggtcggacttcattttgtactgtgggctgtgctggccctttcaaggtttttcaagagttggttttgcgtttccaacctcggagaattccaggcactccccttccccctccgctgacatacttgtataagcggtcatcgttgcgtcatggggcaggcgtggggagcttcctgtcgccttggctgggtgtgggcctggaggaaggtcctggggcgtgcactcgcctgggcagtggggaggagagtggcctgagttacttcacccccgcgtgctgctggttaatgtcccgcgtctctgcaccttcgggtgggagcggggactgatctactttcacattctcaagtttttctcatctgcattagaggtccccagtaggttcccaggttccagcgtgcccctccctcagacacacggacacaatcagccgagaagttcctggtctgaatcacgagaatgtggaggggtggggggtgtcagtggaaaggcataaggctgagctgagaccagttgctggtgaaactgggccaatctggggaggggaacatccttgccagggagtttctgagggtctgctttgtttacctttcgtgcggtggattctttttaactccgtctacctggcgttttgttagaaatgtcagataggaaaataaaaaccatttgagt

SEQ ID NO: 103 - DNA, 952 bp, Homo sapiens
tgaactctggatgctgttagcctgagactcaggaagacaacttctgcagggtcactccctggcttctggaggaaagagaaggagggcagtgctccagtggtacagaagtgagacataatggaatcaggcttcacctccaaggacacctatctaagccattttaaccctcgggattacctagaaaaatattacaagtttggttctaggcactctgcagaaagccagattcttaagcaccttctgaaaaatcttttcaagatattctgcctagacggtgtgaagggagacctgctgattgacatcggctctggccccactatctatcagctcctctctgcttgtgaatcctttaaggagatcgtcgtcactgactactcagaccagaacctgcaggagctggagaagtggctgaagaaagagccagaggcctttgactggtccccagtggtgacctatgtgtgtgatcttgaagggaacagagtcaagggtccagagaaggaggagaagttgagacaggcggtcaagcaggtgctgaagtgtgatgtgactcagagccagccactgggggccgtccccttacccccggctgactgcgtgctcagcacactgtgtctggatgccgcctgcccagacctccccacctactgcagggcgctcaggaacctcggcagcctactgaagccagggggcttcctggtgatcatggatgcgctcaagagcagctactacatgattggtgagcagaagttctccagcctccccctgggccgggaggcagtagaggctgctgtgaaagaggctggctacacaatcgaatggtttgaggtgatctcgcaaagttattcttccaccatggccaacaacgaaggacttttctccctggtggcgaggaagctgagcagacccctgtgatgcctgtgacctcaattaaagcaattcctttgacctgtca

SEQ ID NO: 104 - DNA, 3317 bp, Homo sapiens
ccccagcgaggctccgggagcccttgcctgcgggggtccggggactcgagccggcctccgccccccggacgcacagccagcgtggtccccgcgtgcaacgcgagcgccggggagtggctcctgctttgcccctcgtgggggccgagccaagaccagtctgcaaactccatcccgccggctggaagaagtcgcggagccggcaccaaacccgcagcgtcttcccgcgcggatcccgggacttaaaaagccggggccaccccggcccaggacgggatgcgggtcggtccggtgcgctctgccatgagcggcgcctcgcagccccgcggcccggccctgctcttcccagccacccgaggcgtcccggccaaacgcctgctggacgccgacgacgcggcggctgtggcggccaagtgcccgcgcctctccgagtgctccagccccccggactacctcagcccccccggctcgccctgcagcccgcagcccccgcctgccgctccgggggccggcggaggctccgggagcgcgccggggcccagccgcatcgccgactacctgctgctgcccctagccgagcgcgagcatgtgtcccgggcgctgtgcatccacactggacgcgagctgcgctgcaaggtgtttcccattaaacactaccaggacaaaatcaggccttacatccagctgccatcgcacagcaacattactggcattgtggaagtgatccttggggaaaccaaggcctatgtcttctttgagaaggactttggggacatgcactcctatgtgcgaagccggaagaggctgcgggaagaggaagccgcccggctcttcaagcagattgtctccgccgtcgcccactgccaccagtcagccatcgtgctgggggacctgaagcttaggaagttcgtcttctccacggaggagagaacccagcttagactagaaagtctagaagacacacacataatgaagggggaagatgatgctttgtcagacaaacatggctgcccagcctacgtgagccctgagatcctcaacaccactgggacctactccggaaaggctgcggacgtttggagcctgggggtgatgctctacacccttctggttggacgataccccttccatgactcagaccccagtgcccttttctccaaaattcggcgtggacagttctgcattcctgagcacatttcccccaaagccaggtgcctcattcgcagcctcttgagacgggagccctccgagagactcactgcccccgagatcctactgcacccctggtttgagtccgtcttggaacccgggtacatcgactcagaaataggaacttcagaccagattgttccagagtaccaggaggacagtgacattagttccttcttctgctaatccccaaaacctcagaaacctcataattcttaacacctggcatttccatttctaaagatggacaggccctttggcatggtaccaaccagataatgactgcatcaggatgaaagctgctgaactcggcatggcgcctcctcttctctgttgggatgagtgactttattgatttgagcagcatatgctgtgattggctgccctgcaaatttgtttcccttaaggaaccctcaccaactatctctgctggatttgggagttccgcatcttttgtggagggcagagtatggacatcttacacccggtggtcaagtgtgtaataaacttgagcattcgaatgggagaaaaagcaaatcgcacaatgacatattttgagtaataaccgtatttttcacagggtgacaaattgggccaataaatctgccatctttgaactcatctttggtggctagactgctacggcagcttctctgatgggaaagttccttttttggcttaacactcaccctttcttcacactcacatttaccaatgactctgctccgtttttggagcagactgttttaagttgctcaggagcctgatggaaccatgaaccgagactcttctctgtttcctgccaagacctcatctgcactaatgccttctccctgaccttgacacttccccctttagctataaaagcacttaccagccgaacgtggaacagtatcacaaaagattccatctcccaacgatttcagaactctgagctcagagagactccagattttaaaaaataatttgagtgcttggaaactattagctttttaagttccttccaaatatgttagtacctaccctttactttttccccaagaccatctcagggtggagcattctgtctaagagaagaaagataaggaggctcccacccacctctcccaagagcagacattaaacatctttgtgctttgaagagagtgaattttggatagtcttgtgattctcagactaacttccagaattatactttaacccctcccagatatggtccgcctttggcattgtgtgtacatctgcagttttgcatggtgggttgttaatatttcaaatgtgtggtttatgaatacgtctgtataatcggcttctggagtgaaacagcaaaccccaaatcttcaaagttggaaggaactttaaaaatcatccggtccaatctctttcctctttctgccacctcccaaggcagaaatcccctcttcagcttcttttgtaggtgggaatccagcctctgttagatatgtccagagatggaaactcactcccctacaaaagatggagcttaatggagaaattgcaactttcattaaaaaacaaattcagatgaaatatcagtaactgtcttggacagtgctgaaatcaggtggttaaacgggtaaacaaaatatactgtattttgagaaatggcacaaaaacaggcagtcatctttaagggctatgcctaggcaaactactaacatgcattgtgagaatgccgtgtatacctcacgtactgtgtactttgtacatatattttaccttttatacctatgttcgattttgttttgttttgttctggctttgaggcttgttttgttgtctgtgtctgtctgaataacctgcgtgtctaaaaccacgtgaaatgtgaatgattattggcaatattaccttgacagaatcatgggactttgagaagagggaggacagaggcctctgtcgcactaacgctctcgtggttgctcgactgttgtatctgtgatacattatccgactaaggactctgggctggcagggccttctgccgggaaagctagaaacactaggttcttcctgtacatacgtgtatatatgtgaacagtgagatggccgtttctgacttgtagagaaattttaataaacctggtttcgta

SEQ ID NO: 105 - DNA, 6741 bp, Homo sapiens
  modified_base (758)..(758): a, c, g, t, unknown, or other
  modified_base (760)..(760): a, c, g, t, unknown, or other
  modified_base (762)..(766): a, c, g, t, unknown, or other
  modified_base (768)..(775): a, c, g, t, unknown, or other
  modified_base (777)..(782): a, c, g, t, unknown, or other
  modified_base (810)..(810): a, c, g, t, unknown, or other
  modified_base (812)..(812): a, c, g, t, unknown, or other
  modified_base (928)..(928): a, c, g, t, unknown, or other
  modified_base (1203)..(1203): a, c, g, t, unknown, or other
  modified_base (1207)..(1207): a, c, g, t, unknown, or other
  modified_base (1420)..(1424): a, c, g, t, unknown, or other
  modified_base (1485)..(1485): a, c, g, t, unknown, or other
  modified_base (1501)..(1501): a, c, g, t, unknown, or other
  modified_base (1542)..(1545): a, c, g, t, unknown, or other
  modified_base (1692)..(1692): a, c, g, t, unknown, or other
  modified_base (1841)..(1841): a, c, g, t, unknown, or other
  modified_base (1892)..(1892): a, c, g, t, unknown, or other
  modified_base (1931)..(1938): a, c, g, t, unknown, or other
  modified_base (1940)..(1948): a, c, g, t, unknown, or other
  modified_base (2009)..(2009): a, c, g, t, unknown, or other
  modified_base (2871)..(2871): a, c, g, t, unknown, or other
  modified_base (2873)..(2873): a, c, g, t, unknown, or other
  modified_base (3020)..(3020): a, c, g, t, unknown, or other
  modified_base (3380)..(3380): a, c, g, t, unknown, or other
aagcttaaaaaggagtaggcgggaggcgggggcacgatggttccccagaccaccccagcccaggggggttgtgttctggggattcaggaggtcgaggcacccagtccgtggtgagcagggccaggtctccttccttcccaagagcacggtgcgagtgccttccccacagctctcccaggtgtctgtctccctcactcccccagggccaggacagcgagcagggagcacgccttcctcctggtccctcccagaccctcgccaggctcagcagacccctctcctgttgcgttgctccttcggcaggaggtcagcgtgggtgagaagggagcagaggccagatgacccttcatgtcagttcaaggagaggcccccaggtcctcctcacgggttccactcccctcaccctcccagtatccatgagcatcccaccgccaccaagtgcagggcatccagggggtggagagtggatgggcttgaaggggagtgggtatgaggtttggacaaccccagatgtgaagagtgtgtgtgtgtgttgtgcacgtggattgcctgtatggtattgcaggggagaagaggatttggaaaaggtgcaaggaaattgcaagaatagaaaatgaaagaggaagtagaaaggtttgcggtataagaagggtgagagaaaggggagtggggttatggagggatctagaagagaatagtggggagggaaagggcaggaatggaaggcaagcccatcaccccaaggccccttccccatntntnnnnntnnnnnnnntnnnnnntttttttttttttttttttttttttttntntttgggtcatttccacatgctttattccagcaatcaaaataattaaaaacatctcaaattattatacacatacaaaataggtacagagtcttttgcttcctcccacccctaggggnaaaaactgctttgtgctttgggaagttgtctctgaaacccggggacagaggacgcaggacagactaggagggagccgggaggatgggctgcagctgtggaggagggtttcagaggagagaggtcggagagcagaggcctgagaagccagaggcaggtggagagagggtggaaagtgagcagcgggctgggctggagccgcacacgctctcctcccatgttaaatagcacctttagaaaaattcacaagtccccatccacaaaaaaaaaaaaaaanaaanaaaaaatatcaaggaataaaaatagactttgaacaaaaaggaacatttgctggcctgggggggcatctcaatttctatagcaccagtgattccctccccaccccacccatcacatagatgtagcacctttggtataaaaatggggagccgcttccaccctgcccccatccccgcccccaggcagttgccccggtgacacatcaagacaagaannnnntagtctttcagcaacacagttacacaaggaacagaacagaacagtctctcccgcccagccntgcggcacaagggatngacacgcgttccccaaatccgatgtttctgctttgtcgtgnnnngcccttcctgactctcctccgaacccagtgaggggctggtggctcccccggcatgaccccctcaaaaacgaaggggagatgttgcaagagccatgggagcgccagatggcaaggcttctttggcagtctgagaaccccaggtccccnagggcctgggggtgctgggcgggcaggagcgggctgagggtgggggccacttgggtgtttgagcattgcctttgattgctgggcagacaatacattgtttcctgtgtcttctggggagacagatttgggaaggagtggaggggaggccnaaggggggtgtggagaaaggagcagaaagggcagcattggggtttcataanccaacgggcagaaagggacttacccccgcatgggtcttnnnnnnnntnnnnnnnnnttccttttttaaaaagttatttatttattctttttttttttttttttttttttggtaaggnttgaatgcacttttggtttttggtcatgttcggttggtcaaagataaaaactaagtttgagagatgaatgcaaaggaaaaaaatattttccaaagtccatgtgaaattgtctcccattttttggcttttgagggggttcagtttgggttgcttgtctgtttccgggttggggggaaagttggttgggtgggagggagccaggttgggatggagggagtttacaggaagcagacagggccaacgtcgaagccgaattcctggtctggggcaccaacgtccaagggggccacatcgatgatgggcaggcgggaggtcttggtggttttgtattcaatcactgtcttgccccaggctccggtgtgactcgtgcagccatcgacagtgacgctgtaggtgaagcggctgttgccctcggcgcggatctcgatctcgttggagccctggaggagcagggccttcttgaggttgccagtctgctggtccatgtaggccacgctgttcttgcagtggtaggtgatgttctgggaggcctcggtggacatcaggcgcaggaaggtcagctggatggccacatcggcagggtcggagccctggccgccatactcgaactggaatccatcggtcatgctctcgccgaaccagacatgcctcttgtccttggggttcttgctgatgtaccagttcttctgggccacactgggctgagtggggtacacgcaggtctcaccagtctccatgttgcagaagactttgatggcatccaggttgcagccttggttggggtcaatccagtactctccactcttccagtcagagtggcacatcttgaggtcacggcaggtgcgggcggggttcttgcggntnccctctgggctccggatgttctcgatctgctggctcaggctcttgagggtggtgtccacctcgaggtcacggtcacgaaccacattggcatcatcagcccggtagtagcggccaccatcgtgagccttctcttgaggtggctggggnaggaagctgaagtcgaaaccagcgctgggaggaccagggggaccaggaggtccaggagggccggggggaccaacaggaccagcatcaccagtgcgaccgcgaggaccagggggcccaatggggccagggagaccgttgagtccatctttgccaggagcaccagcagagccagggggacctcggggaccagcaggaccagaggctccagagggaccttgttcaccaggagagccaggagggccagggggaccctggaggccagagaagccacggtgaccctttatgcctctgtcgccctgttcgcctgtctcacccttgtcaccacgggggccttggggtccggcggggccacgggcgccnacggggccgacgggaccggcgggaccagcaggaccagtctcaccacgatcaccactcttgccagcagggccaacggggccaggggcaccaggagcaccaggagcaccagggggtccagcggggccggtctcaccacggtcacccttggcgccaggagaaccgtctcgtccaggggaaccttcggcagcaggagccccctcacgtccagattcaccagggggtccagccaatccaggggggcccatgggaccggggggaccacgttcaccacttgctccagagggaccttgtttgccaggttcaccagaggggccaggaagaccagggaagcctctctctcctctctgaccaggcaggccgaccacaccacgctgtccagcaataccttgaggcccgggagtaccaggagcaccagcaggaccatcagcaccaggggatcctttctcgccagcagggccagggggaccagggggaccaacttcaccaggacgtccagcagggccagtctcaccacggggacctttgccgccttctttgccagcaggaccaggagggccagggggtccagcatttccagaggggccaggaggaccgactcggccagcagcaccagggaaaccagtagcaccagggggaccagcgctgccgcgagcacctttggctccaggagcaccaacattaccaatggggccagggggtccagcgggtccggcaggcccagggggaccagcatcgcctttggcaccagcatcaccaggttcgcctttagcaccaggttggccgtcagcaccaggggggccagcaaagccagcagggccggggggaccaggctcaccacggtctccgggggcaccacgagctccagtgggaccagcagggccgctgggaccactttcacccttgtcaccaggggcaccagcagggccaggaggaccaatggggccggtcagaccacggacgccatctttgccaggagagccatcagcacctttgggaccagcatcacctctgtcacccttaggccctggaagaccagctgcaccacgttcaccaggcattccctgaaggccaggggcgccctggctaccgggagctccaggggcaccagcatcacccttagcaccatcgttgccgggagcaccgttggcccctcggggtccagcaggaccagggggaccttgcacaccacgctcgccagggaaacctctctcgcctcttgctccagaggggccaggggcgccaaggtctccaggaacaccctgttcaccaggtttgcctgcttcacctggaggaccagcaggaccagggagaccctggaatccgggggagccagcagggccttgttcacctctctcgccagcgggaccagcagggccagggggtccctgagctccagcctctccatctttgccagcaggaccgacagcgccagggggtccgggaacacctcgctctccagccttgccgggctctccagcagcacctttaggtccagggaatcccatcacaccagcctgaccacgggcaccaggtgggcctgggggtccggggcgaccatcttgaccggcgggaccaggggggccagttttgccatcaggaccagggctgccagggcttccagtcagacccttggcaccaggcagaccagcttcaccgggacgaccagcttcaccaggagatcctttggggccagcggggccaggagaaccacgttcaccagcgggacccttgggaccagcaacaccatctgcgccagggaaaccacggctaccaggtccaccacgctcgccagggggtccgggcaggccagtgggtccgggttcacctcgagctcctcgctttccttcctctccagcagggccagggggtccttgaacaccaacagggccaggctctcccttagcaccagtgtctcctttgctgccaggagcaccaggttcaccgctgttacccttgggaccaggagggccgccggggccctggggtccagaggggcctcgggcaccagggaagccaggagcaccagcaataccaggagcaccattggcacctttagcaccaggctgtccatcagcaccagggtttccagcagggccagcagcaccagcagggccaggggggccaggctcaccacgcacaccctggggaccttcagagcctcggggcccttggggaccagcttcacccttagcaccaacagcaccagggaagccaggaggaccagcggggccggtgggaccagggggcccggcagcaccagtagcaccatcatttccacgagcaccagcagggccaggggctccagggcgacctctctcaccaggcaggccacgggggcccatctgaccaggagctccattttcaccagggctgccaggctcacccttaggaccagcaggaccagcatctcccttggcaccatccaaaccactgaaacctctgtgtcccttcattccagggaggccagctgttccgggcaatcctcgagcaccctgaggcccaggaggcccacgctcaccaggacgaccaggttttccagcttccccatcatctccattctttccagggggacctgggggacctcggggacccatgggacctgaagctccaggctcgccaggctcaccagggggaccttggaagccttggggaccaggtgcaccaggggggccagggagaccacgaggaccagagggacccatggggccaggcacggaaattcctccggttgatttctcatcatagccataagacagctggggagcaaagtttcctccgaggccagggggtccgggaggtccggggggtccggggggtccgggaagtccaggctgtccagggatgccatctcggccaggggggcctgcgggtccccttgggcctcgggggccagtgtctcccttgggtccctcgacgccggtggtttcttggtcggtgggtgactctgagccgtcggggcagacgggacagcactcgccctcggggacttcggcgccggggcagttcttggtctcgtcacagatcacgtcatcgcacaacaccttgccgttgtcgcagacgcagatccggcagggctcgggtttccacacgtctcggtcatggtacctgaggccgttctgtacgcaggtgattggtgggatgtcttcgtcttggccctcgacttggccttcctcttggccgtgcgtcaggagggcggtggccgctaagaggagcaggagccggaggtccacaaagctgaacatgtctagaccctagacatgtagactctttgtggctggggagggggttagcgtccgctcatgcgtggcctcacactccgcgtgcctcctgctccgaccccgaggagaaactcccgtctgct

SEQ ID NO: 106 - DNA, 6741 bp, Homo sapiens; identical to SEQ ID NO: 105
  modified_base (758)..(758): a, c, g, t, unknown, or other
  modified_base (760)..(760): a, c, g, t, unknown, or other
  modified_base (762)..(766): a, c, g, t, unknown, or other
  modified_base (768)..(775): a, c, g, t, unknown, or other
  modified_base (777)..(782): a, c, g, t, unknown, or other
  modified_base (810)..(810): a, c, g, t, unknown, or other
  modified_base (812)..(812): a, c, g, t, unknown, or other
  modified_base (928)..(928): a, c, g, t, unknown, or other
  modified_base (1203)..(1203): a, c, g, t, unknown, or other
  modified_base (1207)..(1207): a, c, g, t, unknown, or other
  modified_base (1420)..(1424): a, c, g, t, unknown, or other
  modified_base (1485)..(1485): a, c, g, t, unknown, or other
  modified_base (1501)..(1501): a, c, g, t, unknown, or other
  modified_base (1542)..(1545): a, c, g, t, unknown, or other
  modified_base (1692)..(1692): a, c, g, t, unknown, or other
  modified_base (1841)..(1841): a, c, g, t, unknown, or other
  modified_base (1892)..(1892): a, c, g, t, unknown, or other
  modified_base (1931)..(1938): a, c, g, t, unknown, or other
  modified_base (1940)..(1948): a, c, g, t, unknown, or other
  modified_base (2009)..(2009): a, c, g, t, unknown, or other
  modified_base (2871)..(2871): a, c, g, t, unknown, or other
  modified_base (2873)..(2873): a, c, g, t, unknown, or other
  modified_base (3020)..(3020): a, c, g, t, unknown, or other
  modified_base (3380)..(3380): a, c, g, t, unknown, or other

SEQ ID NO: 107 - DNA, 2464 bp, Homo sapiens
cggaaacttgggggagtgcacagaagaacttcgggagcgcacgcgggaccagggaccaggctgagactcggggcgccagtccgggcaggggcagcgggacgcggccggagatgccctgtatccaagcccaatatgggacaccagcaccgagtccgggaccccgtgaccacctggcaagcgaccccctgacccctgagttcatcaagcccaccatggacctggccagccccgaggcagcccccgctgcccccactgccctgcccagcttcagcacgttcatggacggctacacaggagagtttgacaccttcctctaccagctgccaggaacagtccagccatgctcctcagcctcctcctcggcctcctccacatcctcgtcctcagccacctcccctgcctctgcctccttcaagttcgaggacttccaggtgtacggctgctaccccggccccctgagcggcccagtggatgaggccctgtcctccagtggctctgactactatggcagcccctgctcggccccgtcgccctccacgcccagcttccagccgccccagctctctccctgggatggctccttcggccacttctcgcccagccagacttacgaaggcctgcgggcatggacagagcagctgcccaaagcctctgggcccccacagcctccagccttcttttccttcagtcctcccactggccccagccccagcctggcccagagccccctgaagttgttcccctcacaggccacccaccagctgggggagggagagagctattccatgcctacggccttcccaggtttggcacccacttctccacaccttgagggctcggggatactggatacacccgtgacctcaaccaaggcccggagcggggccccaggtccaagtgaaggccgctgtgctgtgtgtggggacaacgcttcatgccagcattatggtgtccgcacatgtgagggctgcaagggcttcttcaagcgcacagtgcagaaaaacgccaagtacatctgcctggctaacaaggactgccctgtggacaagaggcggcgaaaccgctgccagttctgccgcttccagaagtgcctggcggtgggcatggtgaaggaagttgtccgaacagacagcctgaaggggcggcggggccggctaccttcaaaacccaagcagcccccagatgcctcccctgccaatctcctcacttccctggtccttgcacacctggattcagggcccagcactgccaaactggactactccaagttccaggagctggtgctgccccactttgggaaggaagatgctggggatgtacagcagttctacgacctgctctccggttctctggaggtcatccgaaagtgggcggagaagatccctggctttgctgagctgtcaccggctgaccaggacctgttgctggagtcggccttcctggagctcttcatcctccgcctggcgtacaggtctaagccaggcgagggcaagctcatcttctgctcaggcctggtgctacaccggctgcagtgtgcccgtggcttcggggactggattgacagtatcctggccttctcaaggtccctgcacagcttgcttgtcgatgtccctgccttcgcctgcctctctgcccttgtcctcatcaccgaccggcatgggctgcaggagccgcggcgggtggaggagctgcagaaccgcatcgccagctgcctgaaggagcacgtggcagctgtggcgggcgagccccagccagccagctgcctgtcacgtctgttgggcaaactgcccgagctgcggaccctgtgcacccagggcctgcagcgcatcttctacctcaagctggaggacttggtgccccctccacccatcattgacaagatcttcatggacacgctgcccttctgacccctgcctgggaacacgtgtgcacatgcgcactctcatatgccaccccatgtgcctttagtccacggacccccagagcacccccaagcctgggcttgagctgcagaatgactccaccttctcacctgctccaggaggtttgcagggagctcaagcccttggggagggggatgccttcatgggggtgaccccacgatttgtcttatcccccccagcctggccccggcctttatgttttttgtaagataaaccgtttttaacacatagcgccgtgctgtaaataagcccagtgctgctgtaaatacaggaagaaagagcttgaggtgggagcggggctgggaggaagggatgggccccgccttcctgggcagcctttccagcctcctgcctggctctctcttcctaccctccttccacatgtacataaactgtcactctaggaagaagacaaatgacagattctgacatttatatttgtgtattttcctggatttatagtatgtgacttttctgattaatatatttaatatattgaataaaaaatagacatgtagttg

SEQ ID NO: 108 - DNA, 5453 bp, Homo sapiens
  modified_base (498)..(498): a, c, g, t, unknown, or other
  modified_base (549)..(549): a, c, g, t, unknown, or other
  modified_base (552)..(564): a, c, g, t, unknown, or other
  modified_base (566)..(567): a, c, g, t, unknown, or other
  modified_base (569)..(569): a, c, g, t, unknown, or other
  modified_base (581)..(581): a, c, g, t, unknown, or other
  modified_base (686)..(686): a, c, g, t, unknown, or other
  modified_base (1411)..(1411): a, c, g, t, unknown, or other
  modified_base (1414)..(1414): a, c, g, t, unknown, or other
  modified_base (1435)..(1435): a, c, g, t, unknown, or other
  modified_base (1915)..(1915): a, c, g, t, unknown, or other
  modified_base (2753)..(2753): a, c, g, t, unknown, or other
  modified_base (2776)..(2776): a, c, g, t, unknown, or other
  modified_base (2797)..(2797): a, c, g, t, unknown, or other
  modified_base (2812)..(2812): a, c, g, t, unknown, or other
  modified_base (2836)..(2836): a, c, g, t, unknown, or other
  modified_base (2948)..(2948): a, c, g, t, unknown, or other
  modified_base (3472)..(3472): a, c, g, t, unknown, or other
  modified_base (3533)..(3533): a, c, g, t, unknown, or other
  modified_base (3535)..(3535): a, c, g, t, unknown, or other
  modified_base (5047)..(5047): a, c, g, t, unknown, or other
  modified_base (5074)..(5074): a, c, g, t, unknown, or other
  modified_base (5093)..(5093): a, c, g, t, unknown, or other
ttttttttttttttttttttttttttttttttttttttcttttggaaaaccaaacatgctttatttcatttttttcacaatttatttaaacatctcacatatacaaaataggtacaatttaatttttctgcttgcccaagaaacaaagcttctgtggaaccatggaagaagatgaaaatgagactggcaaagaacaaatgctgaatctgaagaagaggacaactttgggcaaataatctgcatacttttaattgggaataagatggaaaatatgaatgctaaatcaaattttttaaaaaatacaccacacgatacaactcaatacaggagtatttcttctcaaattcttctagcaccatcaacattcttcaagtatctgaaatactattaattagcacctttgtattatgaacaaaacaaaacaaggacctcagttcatctctgtctaggtcagcacctaacaatgtggatcacactcatgggaaagtgttttgaggntagtttaaacctttggaagtttgggttttaaacttccctctgtggaagatnttnnnnnnnnnnnnntnntncaaatgtttatnggtttttatttttcaatttttattttggttttcttacaaaggttgacattttccataacaggtgtaagagtgttgaaaaaaaaattcaaatttttgggggagcgngggaaggagttaatgaaactgtattgcacaatgctctgatcaatccttctttttctcttttgcccacaatttaagcaagtagatgtgcagaagaaatggaaggattcagctttcagttaaaaaagaagaagaagaaatggcaaagagaaagttttttcaaatttctttcttttttaatttagattgagttcatttatttgaaacagactgggccaatgtccacaaagaattcctggtcagcaccaccgatgtccaaaggtgcaatatcaaggaagggcaggcgtgatggcttatttgttttgtattcaatgattgtctttccccattcatttgtctttttagagcagccatctacaagaacagtgtaagtgaacctgctgttgccctcagcaacaagttcaacatcattagagccctgtagaatgacagcctttttcaggttgccagtctcctcatccatgtatgcaatgctgttcttgcagtggtaggtgatgttctgagaggcatagttggccagcaggcgcatgaaggcaagttgggtagccatttccttggaagtcactccttctacattatattcaaactggctgccagcattgatagtttctcctagccagacgtgtttcttgtccttggagctcctataccagttcttggctgggatgttttcaggttgggcccggatacaggtttcgccagtagagaaatcacagtatactttgatngcntccatagtgcatccttggttngggtcaatccagtagtaaccactgctccactctgggtggctgagtctcaagtcacggcatgtgcgagctgggttctttctagagccttcaggagtaagaagggtctcaatctggttgttgagagacttcagagtagcatcaacttcatagtccttgggtctgagagaaggtgctgagcgaggctggtcagccctgtagaagtctccatcgtaaccaaagtcataaccaccaccgcttacacctggaggtccaggagggccagggggaccaggggggccagcagggccttggtgaccctgagggcctcgaatgccagcaggtccaaccgtaccaggatgtccagtgcgaccatcttttccagcagggccagaaggaccagcagggcccctaggaccagcaggacccacggagccaggagcaccttgatcaccatggtgaccagcgataccaggcagaccttgcaatccattgtgtcccttnaagccaggaagacctctgggccccttttcaccgggctctcccttatcgccacgaatgccttgtgggccactaggacctcttgggccaacagcaccagcaggaccaacaggaccagaaggaccagtttcaccacggtttccatgtttgccagcaggacccacggggccatgaggaccaggtgcacctgcagcaccaacgggaccaatattgccagggtaaccgcgctctcccttgtgtccgggttgaccatcgcgacctgggggaccatcgttcccagggttgccatcacgaccagcttcaccaggagcaccgttgactccaggactacccacagcaccaggaggaccacgggccccaggagggccggcaatgccaagaggaccaggttcacccacagcaccagcaacaccaggtagaccacgttcacctctcgagccagggagacccagaataccaggagcaccaagaagaccctgaggacctggagtgccaggaggtccagcagtaccagcctctccagagggacccttctcaccagcgaagccagggggaccaactgcacctacttctccagttcggccaactggaccttggtcaccacgaggaccacgaagcccttctttcccagcaggaccagggggaccaggagggccagaaataccagagggtcctgggggaccagtccgtccagcagcaccagggaaaccagtcataccaggggggcctccatcaccacgacttccagcaggaccggggggaccatttggaccagctgggccagcagctccaacggggcctgtgggaccaacaacaccgttttcacccttaggccctttgnctcctctttctcctttagcaccnggttgaccagcagcaccagcnggaccagcaaatccnttggggccagcaggaccgacctcnccacgttcaccagggcttccccgaggaccagcaggaccagcaggaccagcagccccagcttcgccccggtcacctgtggctccagcaggaccaggggcacctacagcaccangagcaccacgagcaccatctctgccagggttaccaatttcacctctgagaccaggttcacccttttctcccttgcctccaggtatgccagcagcacccctctctcctgggagtccactaggaccagatggaccagcagtgcccacagcaccaaccacaccaggttcacccttgtttccatcaggccctgggggtccagaaggacctcggcttccaataggaccagtaggaccggcagcaccactctcacctgggggaccgcgttcccctcttggaccagcaggaccagggagaccaaactcaccatggagacccctttctcctggtttgccaacttcaccagcgggacctgaggggccaggcagaccctggaagcctggaggaccagcgggaccctgttcaccttttccaccttgaacaccctgtggtccaggaggtccctgagcaccattgtttccatcaggacctggagcaccccgagcaccagcaagaccagcatgacctttatcaccgtttttgccaggntcaccagtggggcctttgggtccagggaatccaatgttgccaggctctcctcttgctccancngggccaattgggccaggcctgccgtcgatgccagggaggccgacaggaccttcttttccagcggggccgatatttccaggggaaccaggaagacctctgggtcccatgagaccaggctccccagggcgaccagcatctccattaggtcctcggactccagcagggccacttgcaccacgactaccaggagggcccatgacgccagctctgccatcagctccaggaagaccacgagaaccaggactacctctcagcccaggaggtcctggagggccggcagatccagcttccccattagggcctctctttccttcttcaccactgggaccaggaggaccttggggcccagcagagccgggctcacccttgttaccgctctctcctttggagccagctggaccaggctcaccaacaagtcctctggcaccagtagcaccggcagcaccaacagggccaggaataccgcggggtccagggaggccgggagccccagcaacgccgggaaggccagcagcacccttggcaccagtaaggccgtttgctccaggattaccaggaggtccaacggggccggagaggcctggaagacccacttcaccacggggaccggcgggaccagcaggaccagcgttaccaacagctccaatttcacccttggggccaggggcacctgggaagcctggagggccagcagacccaatgggaccagcaggacccacgggacccacacttccatcactgccacgggcaccagctgggccaggggcaccaacacgtcctctctcaccaggaagcccacgggctcctgtttgacctggagttccattttcaccaggggcaccaggttcacccttcacaccaggagcaccgggctgtcccttcaatccatccagaccattgtgtcccctaatgcctttgaagccaggaagtccaggagttccagggaaaccacgagcaccctgtggtccaacaactcctctctcaccaggtcgtccgggttttccagggtgaccatcttcaccagccttgccaggagggccagctggaccacgagcacctgcaggaccagtttgaccaggttcaccaggctcaccagcaggtccttggaaaccttgagggcctggggctccagctgcaccaggtgggcctctaggtcccattaagcccattggtccagggccaagtccaactccttttccatcatactgagcagcaaagttcccaccgagaccaggggggccaggaggaccaggtggaccaggagggcctgtgggaccatcttcaccatctctgcctggggggcctggtggacccctttctccacgtggtcctctatctccggctgggccctttcttacagtttcctcttgtaaagattggcatgttgctaggcataaggttactgcaagcagcaacaaagtccgcgtatccacaaagctgagcatgtctagcacttagacatgcagactccttgtgtcgcagagcccctgggtcaccggcggaggtatcacntggcgggcgcgggcatgcagtcgtggnccagtacctccaacttagnccgaaacctcctgctgccgtggtgctaaaataacaaatcccggatctgccctatttatacggcaaaagtttccctggccctagggtgcctccaaaagggcctccaccaatgggagggctggggctgggggcccgggcagccacagctgggaggagcctgcgggggcgcagaggagggcccgaatgggggaagggacgtggccacggggctggcttcttaaattggttccattctttttgaggacgtggacacttttgaggctttcaaggggaaactctgactcgttgtctgcatacctccgccctccgcatcctcccgccctcccccgccctttccaagtttggaaacactatgggacac

SEQ ID NO: 109 - DNA, 5086 bp, Homo sapiens
  modified_base (27)..(27): a, c, g, t, unknown, or other
  modified_base (46)..(46): a, c, g, t, unknown, or other
agcaccacggcagcaggaggtttcggnctaagttggaggtactggnccacgactgcatgcccgcgcccgccaggtgatacctccgccggtgacccaggggctctgcgacacaaggagtctgcatgtctaagtgctagacatgctcagctttgtggatacgcggactttgttgctgcttgcagtaaccttatgcctagcaacatgccaatctttacaagaggaaactgtaagaaagggcccagccggagatagaggaccacgtggagaaaggggtccaccaggccccccaggcagagatggtgaagatggtcccacaggccctcctggtccacctggtcctcctggcccccctggtctcggtgggaactttgctgctcagtatgatggaaaaggagttggacttggccctggaccaatgggcttaatgggacctagaggcccacctggtgcagctggagccccaggccctcaaggtttccaaggacctgctggtgagcctggtgaacctggtcaaactggtcctgcaggtgctcgtggtccagctggccctcctggcaaggctggtgaagatggtcaccctggaaaacccggacgacctggtgagagaggagttgttggaccacagggtgctcgtggtttccctggaactcctggacttcctggcttcaaaggcattaggggacacaatggtctggatggattgaagggacagcccggtgctcctggtgtgaagggtgaacctggtgcccctggtgaaaatggaactccaggtcaaacaggagcccgtgggcttcctggtgagagaggacgtgttggtgcccctggcccagctggtgcccgtggcagtgatggaagtgtgggtcccgtgggtcctgctggtcccattgggtctgctggccctccaggcttcccaggtgcccctggccccaagggtgaaattggagctgttggtaacgctggtcctgctggtcccgccggtccccgtggtgaagtgggtcttccaggcctctccggccccgttggacctcctggtaatcctggagcaaacggccttactggtgccaagggtgctgctggccttcccggcgttgctggggctcccggcctccctggaccccgcggtattcctggccctgttggtgctgccggtgctactggtgccagaggacttgttggtgagcctggtccagctggctccaaaggagagagcggtaacaagggtgagcccggctctgctgggccccaaggtcctcctggtcccagtggtgaagaaggaaagagaggccctaatggggaagctggatctgccggccctccaggacctcctgggctgagaggtagtcctggttctcgtggtcttcctggagctgatggcagagctggcgtcatgggccctcctggtagtcgtggtgcaagtggccctgctggagtccgaggacctaatggagatgctggtcgccctggggagcctggtctcatgggacccagaggtcttcctggttcccctggaaatatcggccccgctggaaaagaaggtcctgtcggcctccctggcatcgacggcaggcctggcccaattggcccagctggagcaagaggagagcctggcaacattggattccctggacccaaaggccccactggtgatcctggcaaaaacggtgataaaggtcatgctggtcttgctggtgctcggggtgctccaggtcctgatggaaacaatggtgctcagggacctcctggaccacagggtgttcaaggtggaaaaggtgaacagggtcccgctggtcctccaggcttccagggtctgcctggcccctcaggtcccgctggtgaagttggcaaaccaggagaaaggggtctccatggtgagtttggtctccctggtcctgctggtccaagaggggaacgcggtcccccaggtgagagtggtgctgccggtcctactggtcctattggaagccgaggtccttctggacccccagggcctgatggaaacaagggtgaacctggtgtggttggtgctgtgggcactgctggtccatctggtcctagtggactcccaggagagaggggtgctgctggcatacctggaggcaagggagaaaagggtgaacctggtctcagaggtgaaattggtaaccctggcagagatggtgctcgtggtgctcatggtgctgtaggtgcccctggtcctgctggagccacaggtgaccggggcgaagctggggctgctggtcctgctggtcctgctggtcctcggggaagccctggtgaacgtggcgaggtcggtcctgctggccccaacggatttgctggtccggctggtgctgctggtcaaccgggtgctaaaggagaaagaggagccaaagggcctaagggtgaaaacggtgttgttggtcccacaggccccgttggagctgctggcccagctggtccaaatggtccccccggtcctgctggaagtcgtggtgatggaggcccccctggtatgactggtttccctggtgctgctggacggactggtcccccaggaccctctggtatttctggccctcctggtccccctggtcctgctgggaaagaagggcttcgtggtcctcgtggtgaccaaggtccagttggccgaactggagaagtaggtgcagttggtccccctggcttcgctggtgagaagggtccctctggagaggctggtactgctggacctcctggcactccaggtcctcagggtcttcttggtgctcctggtattctgggtctccctggctcgagaggtgaacgtggtctacctggtgttgctggtgctgtgggtgaacctggtcctcttggcattgccggccctcctggggcccgtggtcctcctggtgctgtgggtagtcctggagtcaacggtgctcctggtgaagctggtcgtgatggcaaccctgggaacgatggtcccccaggtcgcgatggtcaacccggacacaagggagagcgcggttaccctggcaatattggtcccgttggtgctgcaggtgcacctggtcctcatggccccgtgggtcctgctggcaaacatggaaaccgtggtgaaactggtccttctggtcctgttggtcctgctggtgctgttggcccaagaggtcctagtggcccacaaggcattcgtggcgataagggagagcccggtgaaaaggggcccagaggtcttcctggcttaaagggacacaatggattgcaaggtctgcctggtatcgctggtcaccatggtgatcaaggtgctcctggctccgtgggtcctgctggtcctaggggccctgctggtccttctggccctgctggaaaagatggtcgcactggacatcctggtacggttggacctgctggcattcgaggccctcagggtcaccaaggccctgctggcccccctggtccccctggccctcctggacctccaggtgtaagcggtggtggttatgactttggttacgatggagacttctacagggctgaccagcctcgctcagcaccttctctcagacccaaggactatgaagttgatgctactctgaagtctctcaacaaccagattgagacccttcttactcctgaaggctctagaaagaacccagctcgcacatgccgtgacttgagactcagccacccagagtggagcagtggttactactggattgaccctaaccaaggatgcactatggatgctatcaaagtatactgtgatttctctactggcgaaacctgtatccgggcccaacctgaaaacatcccagccaagaactggtataggagctccaaggacaagaaacacgtctggctaggagaaactatcaatgctggcagccagtttgaatataatgtagaaggagtgacttccaaggaaatggctacccaacttgccttcatgcgcctgctggccaactatgcctctcagaacatcacctaccactgcaagaacagcattgcatacatggatgaggagactggcaacctgaaaaaggctgtcattctacagggctctaatgatgttgaacttgttgctgagggcaacagcaggttcacttacactgttcttgtagatggctgctctaaaaagacaaatgaatggggaaagacaatcattgaatacaaaacaaataagccatcacgcctgcccttccttgatattgcacctttggacatcggtggtgctgaccatgaattctttgtggacattggcccagtctgtttcaaataaatgaactcaatctaaattaaaaaagaaagaaatttgaaaaaactttctctttgccatttcttcttcttcttttttaactgaaagctgaatccttccatttcttctgcacatctacttgcttaaattgtgggcaaaagagaaaaagaaggattgatcagagcattgtgcaatacagtttcattaactccttcccccgctcccccaaaaatttgaatttttttttcaacactcttacacctgttatggaaaatgtcaacctttgtaagaaaaccaaaataaaaattgaaaaataaaaaccataaacatttgcaccacttgtggcttttgaatatcttccacagagggaagtttaaaacccaaacttccaaaggtttaaactacctcaaaacactttcccatgagtgtgatccacattgttaggtgctgacctagacagagatgaactgaggtccttgttttgttttgttcataatacaaaggtgctaattaatagtatttcagatacttgaagaatgttgatggtgctagaagaatttgagaagaaatactcctgtattgagttgtatcgtgtggtgtattttttaaaaaatttgatttagcattcatattttccatcttattcccaattaaaagtatgcagattatttgcccaaagttgtcctcttcttcagattcagcatttgttctttgccagtctcattttcatcttcttccatggttccacagaagctttgtttcttgggcaagcagaaaaattaaattgtacctattttgtatatgtgagatgtttaaataaattgtgaaaaaaatgaaataaagcatgtttggttttccaaaagaacatat

SEQ ID NO: 110 - DNA, 4322 bp, Homo sapiens
gggaccgacgacacgcccccctctcctcctttgttccgggggtcggcggccgctctcctgccagagctcgggatctcggccccgggaggcgggcgctcgggcgcagccgcgaagatgccgttggaactgacgcagagccgagtgcagaagatctgggtgcccgtggaccacaggccctcgttgcccagatcctgtgggccaaagctgaccaactcccccaccgtcatcgtcatggtgggcctccccgcccggggcaagacctacatctccaagaagctgactcgctacctcaactggattggcgtccccacaaaagtgttcaacgtcggggagtatcgccgggaggctgtgaagcagtacagctcctacaacttcttccgccccgacaatgaggaagccatgaaagtccggaagcaatgtgccttagctgccttgagagatgtcaaaagctacctggcgaaagaagggggacaaattgcggttttcgatgccaccaatactactagagagaggagacacatgatccttcattttgccaaagaaaatgactttaaagcgtttttcatcgagtcggtgtgcgacgaccctacagttgtggcctccaatatcatggaagttaaaatctccagcccggattacaaagactgcaactcggcagaagccatggacgacttcatgaagaggatcagttgctatgaagccagctaccagcccctcgaccccgacaaatgcgacagggacttgtcgctgatcaaggtgattgacgtgggccggaggttcctggtgaaccgggtgcaggaccacatccagagccgcatcgtgtactacctgatgaacatccacgtgcagccgcgtaccatctacctgtgccggcacggcgagaacgagcacaacctccagggccgcatcgggggcgactcaggcctgtccagccggggcaagaagtttgccagtgctctgagcaagttcgtggaggagcagaacctgaaggacctgcgcgtgtggaccagccagctgaagagcaccatccagacggccgaggcgctgcggctgccctacgagcagtggaaggcgctcaatgagatcgacgcgggcgtctgtgaggagctgacctacgaggagatcagggacacctaccctgaggagtatgcgctgcgggagcaggacaagtactattaccgctaccccaccggggagtcctaccaggacctggtccagcgcttggagccagtgatcatggagctggagcggcaggagaatgtgctggtcatctgccaccaggccgtcctgcgctgcctgcttgcctacttcctggataagagtgcagaggagatgccctacctgaaatgccctcttcacaccgtcctgaaactgacgcctgtcgcttatggctgccgtgtggaatccatctacctgaacgtggagtccgtctgcacacaccgggagaggtcagaggatgcaaagaagggacctaacccgctcatgagacgcaatagtgtcaccccgctagccagccccgaacccaccaaaaagcctcgcatcaacagctttgaggagcatgtggcctccacctcggccgccctgcccagctgcctgcccccggaggtgcccacgcagctgcctggacaaaacatgaaaggctcccggagcagcgctgactcctccaggaaacactgaggcagacgtgtcggttccattccatttccatttctgcagcttagcttgtgtcctgccctccgcccgaggcaaaacgtatcctgaggacttcttccggagagggtggggtggagcagcgggggagccttggccgaagagaaccatgcttggcaccgtctgtgtcccctcggccgctggacaccagaaagccacgtgggtccctggcgcctgcctttagcctgggggcccccacctccactctctgggttcctaggaatgtccagcctcggagaccttcacaaagccttgggagggtgatgagtgctggtcctgacaagaggccgctggggacactgtccgttttgtttcgtttctgtgatctcccggcacgtttggagctgggaagaccacactggtggcagaatcctaaaattaaaggaggcagcctcctagttgctgaaagttaaggaatgtgtaaaacctccacgtgactgtttggtgcatcttgacctgggaagacgcctcatgggaacgaacttggacaggtgttgggttgacccctcttctgcaggaagtccctgagctgagacgcaaagttggctgggtggtggtcggcaccctggctcctgcaggtccacacaccttccaggcctgtggcctgcctccaaagatgtgcaagggcaggctggctgcacggggagagggaagtattttgccgaaatatgagaactggggcctcctgctcccagggagctccagggcccctctctcctcccacctggacttggggggaactgagaaacactttcctggagctgctggcttttgcacttttttgatggcagaagtgtgacctgagagtcccaccttctcttcaggaacgtagatgtcggggtgtcttgccctggggggcttggaacctctgaaggtggggagcggaacacctggcatccttccccagcacttgcattacggtccctgctcttccaaggtggggacagtggcccaagcaaggcctcacacgcagccacttcttcaagagctgcctgcacactgtcttggagcatctgccttgtgcctggcactctgccggtgccttgggaaggtcggtaagagtggactttgtcctgggcttcccttcatggcgtctagacacttttgtggtgatggaaagcatgggacctgtcgtctcagcctgttggtttctcctcattgcctcaaaccctggggtaggtggaacggggggtctcgtgcccagatgaaaccatttggaaactcggcagcagagtttgtccaaatgacccttttcaggatgtctcaaagcttgtgccaaaggtcacttttctttcctgccttctgctgtgagccctgagatcctcctcccagctcaagggacaggtcctgggtgagggtgggagatttagacacctgaaactgggcgtggagagaagagccgttgctgtttgttttttgggaagagcttttaaagaatgcatatttttttacctggttggaattgagtaggaactgaggctgtgcttcaggtatggtacaatcaagtgggggattttcatgctgaacccattcaaagccctccccgtccccgcatttccaggccaccctttggctggcgtctgctggagaggatgtctctgtcgcattcccgtgcagctcagctcgcgcaggttttctctctctccctggatgttgagctctcatcagaatatgtgggtggggggtggacgtgcacgggtgcatgattgtgcttaacttggttgtatttttcgatttgacatggaagcctgttgctttgctctagagaatagtttctcgtgtccccttcgcacgcctcattctttgaacctcatctctgatgtttgatacagatgggggcttgatagctgtggtcccctttcccttctgactacgtgaaaatcaatacctaaatacagaagccttggtctaaacaccgagacttttagtttgcgaaggggcttagatagggagagaggtaacatgaatctggacaggggagggagatactatagaaaggagaacactgcatactttgcaaagccagtgacctccttttgaaggggacattggacgggggccgggggcgggggttcggtttgactaccgtcatgaacttttggcgtatactgattcctccaactctccaccccacaaaataacggggaccaatatttttaactttgcctatttgtttttgggtgagtttcccccctccattattctgtcctgagaccacgggcaaagctcttccattttgagagagaagaaaaactgtttggaaccacaccaatgatatttttctttgtaatacttgaaatttatttttttattattttgatagcagatgtgctatttatttatttaatatatgtataaggagtcctaaacaatagaaagctgtagaagctgtagagataggcttcagttgttaattggtttggagcctcctatgtgtgacttatgactctctgtgttctgtgtatttgtctgaattaatgacctgggatataaagctatgctagctttcaaacaggagatgccttcagaaagctttgtatattttgcagttgccagaccaataaaatacctggttgaaatacatggacgaaaaaaaaaaaaaaaaaaaaaaa

SEQ ID NO: 111 - DNA, 1401 bp, Homo sapiens
cgtattgctcggcccggggagtttcgccccctgcccggctccgcggcgcggaggatggcgtggaaacggctgggcgcgctggtgatgttccctctacagatgatctatctggtggtgaaagcagccgtcggactggtgctgcccgccaagctgcgggacctgtcgcgggagaacgtcctcatcaccggcggcgggagaggcatcgggcgtcagctcgcccgcgagttcgcggagcgcggcgccagaaagattgttctctggggccggactgagaaatgcctgaaggagacgacggaggagatccggcagatgggcactgagtgccattacttcatctgtgatgtgggcaaccgggaggaggtgtaccagacggccaaggccgtccgggagaaggtgggtgacatcaccatcctggtgaacaatgccgccgtggtccatgggaagagcctaatggacagtgatgatgatgccctcctcaagtcccaacacatcaacaccctgggccagttctggaccaccaaggccttcctgccgcgtatgctggagctgcagaatggccacatcgtgtgcctcaactccgtgctggcactgtctgccatccccggtgccatcgactactgcacatccaaagcgtcagccttcgccttcatggagagcctgaccctggggctgctggactgtccgggagtcagcgccaccacagtgctgcccttccacaccagcaccgagatgttccagggcatgagagtcaggtttcccaacctctttcccccactgaagccggagacggtggcccggaggacagtggaagctgtgcagctcaaccaggccctcctcctcctcccatggacaatgcatgccctcgttatcttgaaaagcatacttccacaggctgcactcgaggagatccacaaattctcaggaacctacacctgcatgaacactttcaaagggcggacatagagacaggatgaagacatgcttgaggagccacggagtttgggggccacagcacctgggcacacacccgagcacctgtccattggcatgcttctgctgggtgagcaggacagctcctgtccccagcgaagaatccggctgcccctgggccagtcccaggacctttgcacaggactgatgggtgtaactgacccccacagggaggcaggaaaacagccagaagccaccttgacacttttgaacatttccagttctgtagagtttattgtcaattgcttctcaagtctaaccagcctcagcagtgtgcatagaccatttccaggagggtctgtccccagatgctctgcctcccgttccaaaacccactcatcctcagcttgcacaaactggttgaacggcaggaatgaaaaataaagagagatggcttttgtgaaaaaaaaa

SEQ ID NO: 112 - DNA, 884 bp, Homo sapiens
cgaggttcgggtcgtggggcggagggaagagcgggcgggcgggaggcgccggcgccagacgcggagggaaggagctacgagtagccgccgagaggccgcggagccagcgacgaccgacccagccgagccgccgccgccgccgcgcccccatggcggccgccaaggacactcatgaggaccatgatacttccactgagaatacagacgagtccaaccatgaccctcagtttgagccaatagtttctcttcctgagcaagaaattaaaacactggaagaagatgaagaggaactttttaaaatgcgggcaaaactgttccgatttgcctctgagaacgatctcccagaatggaaggagcgaggcactggtgacgtcaagctcctgaagcacaaggagaaaggggccatccgcctcctcatgcggagggacaagaccctgaagatctgtgccaaccactacatcacgccgatgatggagctgaagcccaacgcaggtagcgaccgtgcctgggtctggaacacccacgctgacttcgccgacgagtgccccaagccagagctgctggccatccgcttcctgaatgctgagaatgcacagaaattcaaaacaaagtttgaagaatgcaggaaagagatcgaagagagagaaaagaaagcaggatcaggcaaaaatgatcatgccgaaaaagtggcggaaaagctagaagctctctcggtgaaggaggagaccaaggaggatgctgaggagaagcaataaatcgtcttattttattttcttttcctctctttcctttcctttttttaaaaaattttaccctgcccctctttttcggtttgtttttattctttcatttttacaagggacgttatataaagaactgaactc

SEQ ID NO: 113 - DNA, 3273 bp, Homo sapiens
  modified_base (23)..(25): a, c, g, t, unknown, or other
  modified_base (28)..(28): a, c, g, t, unknown, or other
  modified_base (36)..(36): a, c, g, t, unknown, or other
  modified_base (38)..(38): a, c, g, t, unknown, or other
  modified_base (40)..(40): a, c, g, t, unknown, or other
  modified_base (1486)..(1486): a, c, g, t, unknown, or other
  modified_base (1546)..(1546): a, c, g, t, unknown, or other
  modified_base (1719)..(1719): a, c, g, t, unknown, or other
  modified_base (1835)..(1835): a, c, g, t, unknown, or other
  modified_base (2081)..(2081): a, c, g, t, unknown, or other
  modified_base (2221)..(2224): a, c, g, t, unknown, or other
  modified_base (2226)..(2241): a, c, g, t, unknown, or other
  modified_base (2300)..(2300): a, c, g, t, unknown, or other
  modified_base (2323)..(2323): a, c, g, t, unknown, or other
  modified_base (2352)..(2352): a, c, g, t, unknown, or other
  modified_base (2442)..(2442): a, c, g, t, unknown, or other
  modified_base (3174)..(3174): a, c, g, t, unknown, or other
  modified_base (3177)..(3177): a, c, g, t, unknown, or other
  modified_base (3179)..(3182): a, c, g, t, unknown, or other
  modified_base (3184)..(3185): a, c, g, t, unknown, or other
  modified_base (3187)..(3187): a, c, g, t, unknown, or other
  modified_base (3189)..(3190): a, c, g, t, unknown, or other
  modified_base (3195)..(3195): a, c, g, t, unknown, or other
  modified_base (3200)..(3200): a, c, g, t, unknown, or other
  modified_base (3202)..(3204): a, c, g, t, unknown, or other
  modified_base (3206)..(3206): a, c, g, t, unknown, or other
  modified_base (3218)..(3218): a, c, g, t, unknown, or other
  modified_base (3221)..(3221): a, c, g, t, unknown, or other
  modified_base (3240)..(3240): a, c, g, t, unknown, or other
  modified_base (3243)..(3243): a, c, g, t, unknown, or other
ggggcacagctgtgtttggctgnnnggncaagagcncngncaagaagacccacacgcccccctccagcagctgaattcctgcagctcagcagccgccgccagagcaggacgaaccgccaatcgcaaggcacctctgagaacttcaggatgcagatgtctccagccctcacctgcctagtcctgggcctggcccttgtctttggtgaagggtctgctgtgcaccatcccccatcctacgtggcccacctggcctcagacttcggggtgagggtgtttcagcaggtggcgcaggcctccaaggaccgcaacgtggttttctcaccctatggggtggcctcggtgttggccatgctccagctgacaacaggaggagaaacccagcagcagattcaagcagctatgggattcaagattgatgacaagggcatggcccccgccctccggcatctgtacaaggagctcatggggccatggaacaaggatgagatcagcaccacagacgcgatcttcgtccagcgggatctgaagctggtccagggcttcatgccccacttcttcaggctgttccggagcacggtcaagcaagtggacttttcagaggtggagagagccagattcatcatcaatgactgggtgaagacacacacaaaaggtatgatcagcaacttgcttgggaaaggagccgtggaccagctgacacggctggtgctggtgaatgccctctacttcaacggccagtggaagactcccttccccgactccagcacccaccgccgcctcttccacaaatcagacggcagcactgtctctgtgcccatgatggctcagaccaacaagttcaactatactgagttcaccacgcccgatggccattactacgacatcctggaactgccctaccacggggacaccctcagcatgttcattgctgccccttatgaaaaagaggtgcctctctctgccctcaccaacattctgagtgcccagctcatcagccactggaaaggcaacatgaccaggctgccccgcctcctggttctgcccaagttctccctggagactgaagtcgacctcaggaagcccctagagaacctgggaatgaccgacatgttcagacagtttcaggctgacttcacgagtctttcagaccaagagcctctccacgtcgcgcaggcgctgcagaaagtgaagatcgaggtgaacgagagtggcacggtggcctcctcatccacagctgtcatagtctcagcccgcatggcccccgaggagatcatcatggacagacccttcctctttgtggtccggcacaaccccacaggaacagtccttttcatgggccaagtgatggaaccctgaccctggggaaagacgccttcatctgggacaaaactggagatgcatcgggaaagaagaaactccgaagaaaagaattttagtgttaatgactctttctgaaggaagagaagacatttgccttttgttaaanagatggtaaaccagatctgtctccaagaccttggcctctccttggaggacctttaggtcnaaactccctagtctccacctgagaccctgggagagaagtttgaagcacaactcccttaaggtctccaaaccagacggtgacgcctgcgggaccatctggggcacctgcttccacccgtctctctgcccactcgggtctgcagacctggttcccactgaggccctttgcagganggaactacggggcttacaggagcttttgtgtgcctggtagaaactatttctgttccagtcacattgccatcactcttgtactgcctgccaccgcggaggaggctggtgacaggccnaaaggccagtggaagaaacaccctttcatctcagagtccactgtggcactggccacccctccccagtacaggggtgctgcaggtggcagagtgaatgtcccccatcatgtggcccaactctcctggcctggccatctccctccccagaaacagtgtgcatgggttattttggagtgtaggtgacttgtttactcattgaagcagatttctgcttccttttatttttataggaatagaggaagaaangtcagatgcgtgcccagctcttcaccccccaatctcttggtggggaggggtgtacctaaatatttatcatatccttgcccttgagtgcttgttagagagaaagagaactactaaggaaaataatattatttaaactcgcnnnnannnnnnnnnnnnnnnntgtgtcaccgtatctcaggaagtccagccacttgactggcacacacccctccggacatncagcgtgacggagcccacactgncaccttgtggccgcctgagaccctcgcgncccccgcgccccccgcgcccctctttttccccttgatggaaattgaccatacaatttcatcctccttcaggggatcaaaaggacggagtngggggacagagactcagatgaggacagagtggtttccaatgtgttcaatagatttaggagcagaaatgcaaggggctgcatgacctaccaggacagaactttccccaattacagggtgactcacagccgcattggtgactcacttcaatgtgtcatttccggctgctgtgtgtgagcagtggacacgtgaggggggggtgggtgagagagacaggcagctcggattcaactaccttagataatatttctgaaaacctaccagccagagggtagggcacaaagatggatgtaatgcactttgggaggccaaggcgggaggattgcttgagcccaggagttcaagaccagcctgggcaacataccaagacccccgtctctttaaaaatatatatattttaaatatacttaaatatatatttctaatatctttaaatatatatatatattttaaagaccaatttatgggagaattgcacacagatgtgaaatgaatgtaatctaatagaagcctaatcagcccaccatgttctccactgaaaaatcctctttctttggggtttttctttctttcttttttgattttgcactggacggtgacgtcagccatgtacaggatccacaggggtggtgtcaaatgctattgaaattgtgttgaattgtatgctttttcacttttgataaataaacatgtaaaaatgtttcaaaaaaataataaaataaataaatacgaanaanannnnannanannaaaanaaaanannnanaaaaaaaaaaanaanaaaaaaaaaaaaaaaaaanaanacaaaacaaaaaaaaaaaaaaaaaaaaaaa

SEQ ID NO: 114 - DNA, 2876 bp, Homo sapiens
gaattcctgcagctcagcagccgccgccagagcaggacgaaccgccaatcgcaaggcacctctgagaacttcaggatgcagatgtctccagccctcacctgcctagtcctgggcctggcccttgtctttggtgaagggtctgctgtgcaccatcccccatcctacgtggcccacctggcctcagacttcggggtgagggtgtttcagcaggtggcgcaggcctccaaggaccgcaacgtggttttctcaccctatggggtggcctcggtgttggccatgctccagctgacaacaggaggagaaacccagcagcagattcaagcagctatgggattcaagattgatgacaagggcatggcccccgccctccggcatctgtacaaggagctcatggggccatggaacaaggatgagatcagcaccacagacgcgatcttcgtccagcgggatctgaagctggtccagggcttcatgccccacttcttcaggctgttccggagcacggtcaagcaagtggacttttcagaggtggagagagccagattcatcatcaatgactgggtgaagacacacacaaaaggtatgatcagcaacttgcttgggaaaggagccgtggaccagctgacacggctggtgctggtgaatgccctctacttcaacggccagtggaagactcccttccccgactccagcacccaccgccgcctcttccacaaatcagacggcagcactgtctctgtgcccatgatggctcagaccaacaagttcaactatactgagttcaccacgcccgatggccattactacgacatcctggaactgccctaccacggggacaccctcagcatgttcattgctgccccttatgaaaaagaggtgcctctctctgccctcaccaacattctgagtgcccagctcatcagccactggaaaggcaacatgaccaggctgccccgcctcctggttctgcccaagttctccctggagactgaagtcgacctcaggaagcccctagagaacctgggaatgaccgacatgttcagacagtttcaggctgacttcacgagtctttcagaccaagagcctctccacgtcgcgcaggcgctgcagaaagtgaagatcgaggtgaacgagagtggcacggtggcctcctcatccacagctgtcatagtctcagcccgcatggcccccgaggagatcatcatggacagacccttcctctttgtggtccggcacaaccccacaggaacagtccttttcatgggccaagtgatggaaccctgaccctggggaaagacgccttcatctgggacaaaactggagatgcatcgggaaagaagaaactccgaagaaaagaattttagtgttaatgactctttctgaaggaagagaagacatttgccttttgttaaaagatggtaaaccagatctgtctccaagaccttggcctctccttggaggacctttaggtcaaactccctagtctccacctgagaccctgggagagaagtttgaagcacaactcccttaaggtctccaaaccagacggtgacgcctgcgggaccatctggggcacctgcttccacccgtctctctgcccactcgggtctgcagacctggttcccactgaggccctttgcaggatggaactacggggcttacaggagcttttgtgtgcctggtagaaactatttctgttccagtcacattgccatcactcttgtactgcctgccaccgcggaggaggctggtgacaggccaaaggccagtggaagaaacaccctttcatctcagagtccactgtggcactggccacccctccccagtacaggggtgctgcaggtggcagagtgaatgtcccccatcatgtggcccaactctcctggcctggccatctccctccccagaaacagtgtgcatgggttattttggagtgtaggtgacttgtttactcattgaagcagatttctgcttccttttatttttataggaatagaggaagaaatgtcagatgcgtgcccagctcttcaccccccaatctcttggtggggaggggtgtacctaaatatttatcatatccttgcccttgagtgcttgttagagagaaagagaactactaaggaaaataatattatttaaactcgctcctagtgtttctttgtggtctgtgtcaccgtatctcaggaagtccagccacttgactggcacacacccctccggacatccagcgtgacggagcccacactgccaccttgtggccgcctgagaccctcgcgccccccgcgccccccgcgcccctctttttccccttgatggaaattgaccatacaatttcatcctccttcaggggatcaaaaggacggagtggggggacagagactcagatgaggacagagtggtttccaatgtgttcaatagatttaggagcagaaatgcaaggggctgcatgacctaccaggacagaactttccccaattacagggtgactcacagccgcattggtgactcacttcaatgtgtcatttccggctgctgtgtgtgagcagtggacacgtgaggggggggtgggtgagagagacaggcagctcggattcaactaccttagataatatttctgaaaacctaccagccagagggtagggcacaaagatggatgtaatgcactttgggaggccaaggcgggaggattgcttgagcccaggagttcaagaccagcctgggcaacataccaagacccccgtctctttaaaaatatatatattttaaatatacttaaatatatatttctaatatctttaaatatatatatatattttaaagaccaatttatgggagaattgcacacagatgtgaaatgaatgtaatctaatagaagc

SEQ ID NO: 115 - DNA, 4426 bp, Homo sapiens
tgccttgaccaggacttgggactttgcgaaaggatcgcggggcccggagaggtgttggagagcacaatggctgaacaagtccttcctcaggctttgtatttgagcaatatgcggaaagctgtgaagatacgggagagaactccagaagacatttttaaacctactaatgggatcattcatcattttaaaaccatgcaccgatacacactggaaatgttcagaacttgccagttttgtcctcagtttcgggagatcatccacaaagccctcatcgacagaaacatccaggccaccctggaaagccagaagaaactcaactggtgtcgagaagtccggaagcttgtggcgctgaaaacgaacggtgacggcaattgcctcatgcatgccacttctcagtacatgtggggcgttcaggacacagacttggtactgaggaaggcgctgttcagcacgctcaaggaaacagacacacgcaactttaaattccgctggcaactggagtctctcaaatctcaggaatttgttgaaacggggctttgctatgatactcggaactggaatgatgaatgggacaatcttatcaaaatggcttccacagacacacccatggcccgaagtggacttcagtacaactcactggaagaaatacacatatttgtcctttgcaacatcctcagaaggccaatcattgtcatttcagacaaaatgctaagaagtttggaatcaggttccaatttcgcccctttgaaagtgggtggaatttacttgcctctccactggcctgcccaggaatgctacagataccccattgttctcggctatgacagccatcattttgtacccttggtgaccctgaaggacagtgggcctgaaatccgagctgttccacttgttaacagagaccggggaagatttgaagacttaaaagttcactttttgacagatcctgaaaatgagatgaaggagaagctcttaaaagagtacttaatggtgatagaaatccccgtccaaggctgggaccatggcacaactcatctcatcaatgccgcaaagttggatgaagctaacttaccaaaagaaatcaatctggtagatgattactttgaacttgttcagcatgagtacaagaaatggcaggaaaacagcgagcaggggaggagagaggggcacgcccagaatcccatggaaccttccgtgccccagctttctctcatggatgtaaaatgtgaaacgcccaactgccccttcttcatgtctgtgaacacccagcctttatgccatgagtgctcagagaggcggcaaaagaatcaaaacaaactcccaaagctgaactccaagccgggccctgaggggctccctggcatggcgctcggggcctctcggggagaagcctatgagcccttggcgtggaaccctgaggagtccactggggggcctcattcggccccaccgacagcacccagcccttttctgttcagtgagaccactgccatgaagtgcaggagccccggctgccccttcacactgaatgtgcagcacaacggattttgtgaacgttgccacaacgcccggcaacttcacgccagccacgccccagaccacacaaggcacttggatcccgggaagtgccaagcctgcctccaggatgttaccaggacatttaatgggatctgcagtacttgcttcaaaaggactacagcagaggcctcctccagcctcagcaccagcctccctccttcctgtcaccagcgttccaagtcagatccctcgcggctcgtccggagcccctccccgcattcttgccacagagctggaaacgacgcccctgctggctgcctgtctcaagctgcacggactcctggggacaggacggggacgagcaagtgcagaaaagccggctgcgtgtattttgggactccagaaaacaagggcttttgcacactgtgtttcatcgagtacagagaaaacaaacattttgctgctgcctcagggaaagtcagtcccacagcgtccaggttccagaacaccattccgtgcctggggagggaatgcggcacccttggaagcaccatgtttgaaggatactgccagaagtgtttcattgaagctcagaatcagagatttcatgaggccaaaaggacagaagagcaactgagatcgagccagcgcagagatgtgcctcgaaccacacaaagcacctcaaggcccaagtgcgcccgggcctcctgcaagaacatcctggcctgccgcagcgaggagctctgcatggagtgtcagcatcccaaccagaggatgggccctggggcccaccggggtgagcctgcccccgaagacccccccaagcagcgttgccgggcccccgcctgtgatcattttggcaatgccaagtgcaacggctactgcaacgaatgctttcagttcaagcagatgtatggctaaccggaaacaggtgggtcacctcctgcaagaagtggggcctcgagctgtcagtcatcatggtgctatcctctgaacccctcagctgccactgcaacagtgggcttaagggtgtctgagcaggagaggaaagataagctcttcgtggtgcccacgatgctcaggtttggtaacccgggagtgttcccaggtggccttagaaagcaaagcttgtaactggcaagggatgatgtcagattcagcccaaggttcctcctctcctaccaagcaggaggccaggaacttctttggacttggaaggtgtgcggggactggccgaggcccctgcaccctgcgcatcaggactgcttcatcgtcttggctgagaaagggaaaagacacacaagtcgcgtgggttggagaagccagagccattccacctcccctcccccagcatctctcagagatgtgaagccagatcctcatggcagcgaggccctctgcaagaagctcaaggaagctcagggaaaatggacgtattcagagagtgtttgtagttcatggtttttccctacctgcccggttcctttcctgaggacccggcagaaatgcagaaccatccatggactgtgattctgaggctgctgagactgaacatgttcacattgacagaaaaacaagctgctctttataatatgcaccttttaaaaaattagaatattttactgggaagacgtgtaactctttgggttattactgtctttacttctaaagaagttagcttgaactgaggagtaaaagtgtgtacatatataatatacccttacattatgtatgagggatttttttaaattatattgaaatgctgccctagaagtacaataggaaggctaaataataataacctgttttctggttgttgttggggcatgagcttgtgtatacactgcttgcataaactcaaccagctgcctttttaaagggagctctagtcctttttgtgtaattcactttatttattttattacaaacttcaagattatttaagtgaagatatttcttcagctctggggaaaatgccacagtgttctcctgagagaacatccttgctttgagtcaggctgtgggcaagttcctgaccacagggagtaaattggcctctttgatacacttttgcttgcctccccaggaaagaaggaattgcatccaaggtatacatacatattcatcgatgtttcgtgcttctccttatgaaactccagctatgtaataaaaaactatactctgtgttctgttaatgcctctgagtgtcctacctccttggagatgagatagggaaggagcagggatgagactggcaatggtcacagggaaagatgtggccttttgtgatggttttattttctgttaacactgtgtcctgggggggctgggaagtcccctgcatcccatggtaccctggtattgggacagcaaaagccagtaaccatgagtatgaggaaatctctttctgttgctggcttacagtttctctgtgtgctttgtggttgctgtcatatttgctctagaagaaaaaaaaaaaaggaggggaaatgcattttccccagagataaaggctgccattttgggggtctgtacttatggcctgaaaatatttgtgatccataactctacacagcctttactcatactattaggcacactttccccttagagccccctaagtttttcccagacgaatctttataatttcctttccaaagataccaaataaacttcagtgttttcatctaattctcttaaagttgatatcttaatattttgtgttgatcattatttccattcttaatgtgaaaaaaagtaattatttatacttattataaaaagtatttgaaatttgcacatttaattgtccctaatagaaagccacctattctttgttggatttcttcaagtttttctaaataaatgtaacttttcacaagagtcaacattaaaaaataaattattt

SEQ ID NO: 116 - DNA, 1914 bp, Homo sapiens
gcagccaggcgcgcactgcacagctctcttctctcgccgccgcccgagcgcacccttcagcccgcgcgccggccgtgagtcctcggtgctcgcccgccggccagacaaacagcccgcccgaccccgtcccgaccctggccgccccgagcggagcctggagcaaaatgatgcttcaacacccaggccaggtctctgcctcggaagtgagtgcttctgccatcgtcccctgcctgtcccctcctgggtcactggtgtttgaggattttgctaacctgacgccctttgtcaaggaagagctgaggtttgccatccagaacaagcacctctgccaccggatgtcctctgcgctggaatcagtcactgtcagcgacagacccctcggggtgtccatcacaaaagccgaggtagcccctgaagaagatgaaaggaaaaagaggcgacgagaaagaaataagattgcagctgcaaagtgccgaaacaagaagaaggagaagacggagtgcctgcagaaagagtcggagaagctggaaagtgtgaatgctgaactgaaggctcagattgaggagctcaagaacgagaagcagcatttgatatacatgctcaaccttcatcggcccacgtgtattgtccgggctcagaatgggaggactccagaagatgagagaaacctctttatccaacagataaaagaaggaacattgcagagctaagcagtcgtggtatgggggcgactggggagtcctcattgaatcctcattttatacccaaaaccctgaagccattggagagctgtcttcctgtgtacctctagaatcccagcagcagagaaccatcaaggcgggagggcctgcagtgattcagcaggcccttcccattctgccccagagtgggtcttggaccagggcaagtgcatctttgcctcaactccaggatttaggccttaacacactggccattcttatgttccagatggcccccagctggtgtcctgcccgcctttcatctggattctacaaaaaaccaggatgcccaccgttagattcaggcagcagtgtctgtacctcgggtgggagggatggggccatctccttcaccgtggctaccattgtcactcgtaggggatgtggagtgagaacagcatttagtgaagttgtgcaacggccagggttgtgctttctagcaaatatgctgttatgtccagaaattgtgtgtgcaagaaaactaggcaatgtactcttccgatgtttgtgtcacacaacactgatgtgacttttatatgctttttctcagatctggtttctaagagttttggggggcggggctgtcaccacgtgcagtatctcaagatattcaggtggccagaagagcttgtcagcaagaggaggaacagaattctcccagcgttaacacaaaatccatgggcagcatgatggcaggtcctctgttgcaaactcagttccaaagtcacaggaagaaagcagaaagttcaacttccaaagggttaggactctccactcaatgtcttaggtcaggagttgtgtctaggctggaagagccaaagaaatattccattttcctttccttgtggttgaaaccacagtcagtggagagatgtttggaacacagtcagtggagctggtggtaccaggtttagcattattggatgtcaaaagcattttttttgtcatgtagctgttttaagaaatctggcccagggtgtttgcagctgtgagaagtcactcacactggccacaaggacgctggctactgtctattaaaattctgatgtttctgtgaaattctcagagtgtttaattgtactcaatggtatcattacaattttctgtaagagaaaatattacttatttatcctagtattcctaacctgtcagaataataaatattgtggtaaaa

SEQ ID NO: 117 - DNA, 1975 bp, Homo sapiens
  modified_base (63)..(63): a, c, g, t, unknown, or other
  modified_base (104)..(104): a, c, g, t, unknown, or other
  modified_base (107)..(109): a, c, g, t, unknown, or other
  modified_base (112)..(112): a, c, g, t, unknown, or other
  modified_base (140)..(142): a, c, g, t, unknown, or other
  modified_base (1103)..(1103): a, c, g, t, unknown, or other
  modified_base (1268)..(1270): a, c, g, t, unknown, or other
  modified_base (1286)..(1286): a, c, g, t, unknown, or other
  modified_base (1298)..(1298): a, c, g, t, unknown, or other
  modified_base (1301)..(1301): a, c, g, t, unknown, or other
  modified_base (1342)..(1342): a, c, g, t, unknown, or other
  modified_base (1373)..(1373): a, c, g, t, unknown, or other
  modified_base (1378)..(1378): a, c, g, t, unknown, or other
  modified_base (1386)..(1386): a, c, g, t, unknown, or other
  modified_base (1464)..(1464): a, c, g, t, unknown, or other
  modified_base (1483)..(1483): a, c, g, t, unknown, or other
  modified_base (1486)..(1486): a, c, g, t, unknown, or other
  modified_base (1970)..(1971): a, c, g, t, unknown, or other
  modified_base (1974)..(1974): a, c, g, t, unknown, or other
ccgaacaagatcactcaaggtgaaggataatctactaataccagcactttgaatgaaaatttntttctctgccacaaactgaacatcttttttttttttttttnttnnngtnggggagttgaaacctaattttgtggcgnnnagctatgcagcttgaaatccaagtagcactaaattttattatttcgtatttgtacaataagcttcccaggagacgtgtcaacatttttggtgaagaacttgaaagacttcttaagaagaaatatgaagggcactggtatcctgaaaagccatacaaaggatcggggtttagatgtatacacataggggagaaagtggacccagtgattgaacaagcatccaaagagagtggtttggacattgatgatgttcgtggcaatctgccacaggatcttagtgtttggatcgacccatttgaggtttcttaccaaattggtgaaaagggaccagtgaaggtgctttacgtggatgataataatgaaaatggatgtgagttggataaggagatcaaaaacagctttaacccagaggcccaggtttttatgcccataagtgacccagcctcatcagtgtccagctctccatcgcctccttttggtcactctgctgctgtaagccctaccttcatgccccggtccactcagcctttaacctttaccactgccacttttgctgccaccaagttcggctctaccaaaatgaagaatagtggccgtagcaacaaggttgcacgtacttctcccatcaacctcggcttgaatgtgaatgacctcttgaagcagaaagccatctcttcctcaatgcactctctgtatgggcttggcttgggtagccagcagcagccacagcaacagcagcagccagcccagccgccaccgccaccaccaccaccacagcagcaacaacagcagaaaacctctgctctttctcctaatgccaaggaatttatttttcctaatatgcagggtcaaggtagtagtaccaatggaatgttcccaggtgacagcccccttaacctcagtcctctccagtacagtaatgcctttgatgtgtttgcagcctatggaggcctcaatgagaantcttttgtagatggcttgaattttagcttaaataacatgcagtattctaaccagcaattccagcctgttatggctaactaaaaaaaagaaaatgtatcgtacaagttaaaatgcacgggcccaagggggattttttttttcacctccttgagaattttttttttnnnaagcttatagtaaggnatacattcaagnctnggttaaaaaaataataataaaacatgcatcatttttcattngccaaccaagcacaaagttattttatactgnactgntatatttnaaagtatactctcagatatggcctcttacagtatttaagatatagcaaggacatggctgatttttttttataaaaatnggcactaataagtgggttnatnggtcttttctaattgtataatttaatttagtacaaagtttgtaaaatatcagaggatatatatatattgtttctacgacatggtattgcatttatatctttttactacagtgatctgtgacagcagcagcttcatgttgtattttttttactgaaattgtaaaatatccatcttaaagacatcaactattctaaaaattgtgtacaggatattcctttagtggtggaattaaaatgtacgaatacttgctttttcaaaaaaatgtattttctgttaaaagtttaaagatttttgctatatattatggaagaaaaatgtaatcgtaaatattaattttgtacctatattgtgcaatacttgaaaaaaacggtataaaagtattttgagtcagtgtcttacatgttaagagggactgaaatagtttatattaagtttgtattaaaattctttaaaattaaaaaaaaaaaaaaaaaaaaaaaaaaannaana

SEQ ID NO: 118 - DNA, 1073 bp, Homo sapiens
cggagccagcgtgggaggccgctgccgtcgcgcgccttggtttttctgttccttttttttttttttttttaacttcctgcctatcacacgcagccatcagcccacaaagacatgactaccaacgcgggccccttgcacccatactggcctcagcacctaagactggacaactttgtacctaatgaccgccccacctggcatatactggctggcctcttctctgtcacaggggtcttagtcgtgaccacatggctgttgtcaggtcgtgctgcggttgtcccattggggacttggcggcgactgtccctgtgctggtttgcagtgtgtgggttcattcacctggtgatcgagggctggttcgttctctactacgaagacctgcttggagaccaagccttcttatctcaactctggaaagagtatgccaagggagacagccgatacatcctgggtgacaacttcacagtgtgcatggaaaccatcacagcttgcctgtggggaccactcagcctgtgggtggtgatcgcctttctccgccagcatcccctccgcttcattctacagcttgtggtctctgtgggccagatctatggggatgtgctctacttcctgacagagcaccgcgacggattccagcacggagagctgggccaccctctctacttctggttttactttgtcttcatgaatgccctgtggctggtgctgcctggagtccttgtgcttgatgctgtgaagcacctcactcatgcccagagcacgctggatgccaaggccacaaaagccaagagcaagaagaactgaggagtggtggaccaggctcgaacactggccgaggaggagctctctgcctgccagaagagtctagtcctgctcccacagtttggagggacaaagctaattgatctgtcacactcaggctcatgggcaggcacaagaaggggaataaaggggctgtgtgaaggcactgctgggagccattagaacacagatacaagagaagccaggaggtctatgatggtgacgatttttaaaatcaggaaataaaagatcttgactctaaaaaaaaaaaa

SEQ ID NO: 119 - DNA, 1908 bp, Homo sapiens
  modified_base (58)..(59): a, c, g, t, unknown, or other
  modified_base (61)..(63): a, c, g, t, unknown, or other
  modified_base (563)..(563): a, c, g, t, unknown, or other
  modified_base (648)..(649): a, c, g, t, unknown, or other
  modified_base (1054)..(1054): a, c, g, t, unknown, or other
  modified_base (1711)..(1711): a, c, g, t, unknown, or other
  modified_base (1718)..(1721): a, c, g, t, unknown, or other
agcgcgcgtaatacgactcactatagggcgaattgggtaccgggccccccctcgagtnntnnntttttttttttgtatagagtaaaatttattatagggttgtagaattcatacaacctaaactccttacagcattcagcacctacacaattttgtgcattccacaatacagatagtagtgagaaagaatcactgcattagttaaaaatgactgtctcatgaaaattgttcacatataagtcaggttaattacagagcacctaacagaactgcaaagatgtaatttctaaattcaagaaagttgtacaaaatgaaaaacaaaagaaaccaacaatgttgagatctgatatattttacacaaaaagttcaaaaacaatttaaaatatttcaaattttaaaattgctgcaccataagatgaataaagagcttacttaaaggaaaagaaaaaacaaacaaacaaaaaaaacaacggatggaatttattgtcaggatgttaggtgatatattcatgctgctttcagaaatctaaaccctataaattcaaagaaaaaatgaaactcangtaatttcagtttcaaaaaacaagcaatgccaattaaactaaaatttgacaagagcttgcagtggttagtagttttttttttttnnttttttttaaagcataagcaatagagtaaatgcatgagtaaatatcttgagtatcccataaaccttaatgttaaagtcatattgtaaatctctgacttcttattaccaaggacactctatctgttgcctcttactcttgacagatcttggtctcaacaataaattcgttggggaagtgtctaatcttccagcatttatcaatggcacgtttgttgaaacccagcaagaggtctctgcgacgaaggcggaaggactttctgttattgcaaagttggtaaataaagatgccaaggttactaacatcacgaatttcctccacagcaactaggtcttctcgaaccacataagtttgaggcagatatctgccactcgccagtttgccaaagagctctaccagattttttnggaggcataacaatagaagtattgaggggcatcagatagcagttccccagcaacaagtccaggtaagcagtcattcccttttcaaagtcatgaataattgctgcagggtcactatcagagaaactggggacaggcacatcaatgattgcaatgttgtcatcctcacgaatgtcagcctcctcagtcacaggcaggaagttaggctctcctccacgaagggaatttgcaggatcctcagaatcaaaaaagcacatctctccacggtaaatggtgctcttgggcatgaagtacttgtaaatgcaggctccaccaacaataagtcctgccaagatgaatgaaaggcctaagagagtaagcatacatctcccagaggagccctctttttcctgggtggcaactcggagctccttgccggtcagtatctgagttctgaccgtgcggctcaggagggcctccacgtcttgccgcgcctcctccttttgcacggcggtaggggtattgaaggcgattttcaccatagtgaatcttcgggctgcgcggtaaggcgctgctggaatcagcgtcctgggctgcagactgcaagaggagatcctgttagcccaaacagcacttactttatcttcagtctaacactactgcaagccgaggtctgggatncttatgnnnnagtcccaaactggggggagaccgtgggcgggcccagggaggtgcctaaagggaggagcgagagggggcccaaaaggggcccaagtgcctgagttgggggtttgcgaggtggcgcggatttgccactgggggaagagcaggggaagtggagtccgtggccggctcaggctaaacgtgcctcacctgcc

SEQ ID NO: 120 - DNA, 3775 bp, Homo sapiens
cattcataagactcagagctacggccacggcagggacacgcggaaccaagacttggaaacttgattgttgtggttcttcttgggggttatgaaatttcattaatcttttttttttccggggagaaagtttttggaaagattcttccagatatttcttcattttcttttggaggaccgacttactttttttggtcttctttattactcccctccccccgtgggacccgccggacgcgtggaggagaccgtagctgaagctgattctgtacagcgggacagcgctttctgcccctgggggagcaacccctccctcgcccctgggtcctacggagcctgcactttcaagaggtacagcggcatcctgtgggggcctgggcaccgcaggaagactgcacagaaactttgccattgttggaacgggacgttgctccttccccgagcttccccggacagcgtactttgaggactcgctcagctcaccggggactcccacggctcaccccggacttgcaccttacttccccaacccggccatagccttggcttcccggcgacctcagcgtggtcacaggggcccccctgtgcccagggaaatgtttcaggctttccccggagactacgactccggctcccggtgcagctcctcaccctctgccgagtctcaatatctgtcttcggtggactccttcggcagtccacccaccgccgcggcctcccaggagtgcgccggtctcggggaaatgcccggttccttcgtgcccacggtcaccgcgatcacaaccagccaggacctccagtggcttgtgcaacccaccctcatctcttccatggcccagtcccaggggcagccactggcctcccagcccccggtcgtcgacccctacgacatgccgggaaccagctactccacaccaggcatgagtggctacagcagtggcggagcgagtggcagtggtgggccttccaccagcggaactaccagtgggcctgggcctgcccgcccagcccgagcccggcctaggagaccccgagaggagacgctcaccccagaggaagaggagaagcgaagggtgcgccgggaacgaaataaactagcagcagctaaatgcaggaaccggcggagggagctgaccgaccgactccaggcggagacagatcagttggaggaagaaaaagcagagctggagtcggagatcgccgagctccaaaaggagaaggaacgtctggagtttgtgctggtggcccacaaaccgggctgcaagatcccctacgaagaggggcccgggccgggcccgctggcggaggtgagagatttgccgggctcagcaccggctaaggaagatggcttcagctggctgctgccgcccccgccaccaccgcccctgcccttccagaccagccaagacgcaccccccaacctgacggcttctctctttacacacagtgaagttcaagtcctcggcgaccccttccccgttgttaacccttcgtacacttcttcgtttgtcctcacctgcccggaggtctccgcgttcgccggcgcccaacgcaccagcggcagtgaccagccttccgatcccctgaactcgccctccctcctcgctcggtgaactctttagacacacaaaacaaacaaacacatgggggagagagacttggaagaggaggaggaggaggagaaggaggagagagaggggaagagacaaagtgggtgtgtggcctccctggctcctccgtctgaccctctgcggccactgcgccactgccatcggacaggaggattccttgtgttttgtcctgcctcttgtttctgtgccccggcgaggccggagagctggtgactttggggacagggggtgggaaggggatggacacccccagctgactgttggctctctgacgtcaacccaagctctggggatgggtggggaggggggcgggtgacgcccaccttcgggcagtcctgtgtgaggatgaagggacgggggtgggaggtaggctgtggggtgggctggagtcctctccagagaggctcaacaaggaaaaatgccactccctacccaatgtctcccacacccaccctttttttggggtgcccaggttggtttcccctgcactcccgaccttagcttattgatcccacatttccatggtgtgagatcctctttactctgggcagaagtgagcccccccttaaagggaattcgatgcccccctagaataatctcatccccccacccgacttcttttgaaatgtgaacgtccttccttgactgtctagccactccctcccagaaaaactggctctgattggaatttctggcctcctaaggctccccaccccgaaatcagcccccagccttgtttctgatgacagtgttatcccaagaccctgccccctgccagccgaccctcctggccttcctcgttgggccgctctgatttcaggcagcaggggctgctgtgatgccgtcctgctggagtgatttatactgtgaaatgagttggccagattgtggggtgcagctgggtggggcagcacacctctggggggataatgtccccactcccgaaagcctttcctcggtctcccttccgtccatcccccttcttcctcccctcaacagtgagttagactcaagggggtgacagaaccgagaagggggtgacagtcctccatccacgtggcctctctctctctcctcaggaccctcagccctggcctttttctttaaggtcccccgaccaatccccagcctaggacgccaacttctcccaccccttggcccctcacatcctctccaggaaggcagtgaggggctgtgacatttttccggagaagatttcagagctgaggctttggtacccccaaacccccaatatttttggactggcagactcaaggggctggaatctcatgattccatgcccgagtccgcccatccctgaccatggttttggctctcccaccccgccgttccctgcgcttcatctcatgaggatttctttatgaggcaaatttatattttttaatatcggggggtggaccacgccgccctccatccgtgctgcatgaaaaacattccacgtgccccttgtcgcgcgtctcccatcctgatcccagacccattccttagctatttatccctttcctggtttccgaaaggcaattatatctattatgtataagtaaatatattatatatggatgtgtgtgtgtgcgtgcgcgtgagtgtgtgagcgcttctgcagcctcggcctaggtcacgttggccctcaaagcgagccgttgaattggaaactgcttctagaaactctggctcagcctgtctcgggctgacccttttctgatcgtctcggcccctctgattgttcccgatggtctctctccctctgtcttttctcctccgcctgtgtccatctgaccgttttcacttgtctcctttctgactgtccctgccaatgctccagctgtcgtctgactctgggttcgttggggacatgagattttattttttgtgagtgagactgagggatcgtagatttttacaatctgtatctttgacaattctgggtgcgagtgtgagagtgtgagcagggcttgctcctgccaaccacaattcaatgaatccccgacccccctaccccatgctgtacttgtggttctctttttgtattttgcatctgaccccggggggctgggacagattggcaatgggccgtcccctctccccttggttctgcactgttgccaataaaaagctcttaaaaacgc

SEQ ID NO: 121 - DNA, 531 bp, Homo sapiens
ggcccttcagtatgcgcggacggaagatggcgtccgccacccgtctcatccagcggctgcggaactgggcgtccgggcatgacctgcaggggaagctgcagctacgctaccaggagatctccaagcgaactcagcctcctcccaagctccctgtgggtcctagccacaagctctccaacaattactattgcactcgcgatggccgccgggaatctgtgcccccttccatcatcatgtcgtcgcagaaggcgctggtgtcaggcaagccagcagagagctctgctgtagctgccactgagaagaaggcggtgactccagctcctcccataaagaggtgggagctgtcctcggaccagccttacctgtgacactgcaccctcacggccacccgactactttgcctccttggatttcctccagggagaatgtgacctaatttatgacaaatacgtagagctcaggtatcacttctagttttactttaaaaaataaaaaaatagagacagagtctcaaaaaaaaaaaaaaaaaaa

SEQ ID NO: 122 - DNA, 4152 bp, Homo sapiens
  modified_base (8)..(8): a, c, g, t, unknown, or other
  modified_base (303)..(303): a, c, g, t, unknown, or other
  modified_base (609)..(609): a, c, g, t, unknown, or other
  modified_base (906)..(907): a, c, g, t, unknown, or other
  modified_base (909)..(911): a, c, g, t, unknown, or other
  modified_base (913)..(914): a, c, g, t, unknown, or other
  modified_base (1928)..(1928): a, c, g, t, unknown, or other
  modified_base (2650)..(2651): a, c, g, t, unknown, or other
  modified_base (2718)..(2718): a, c, g, t, unknown, or other
  modified_base (2745)..(2745): a, c, g, t, unknown, or other
  modified_base (3489)..(3489): a, c, g, t, unknown, or other
  modified_base (3899)..(3899): a, c, g, t, unknown, or other
  modified_base (3954)..(3965): a, c, g, t, unknown, or other
  modified_base (4035)..(4035): a, c, g, t, unknown, or other
  modified_base (4049)..(4049): a, c, g, t, unknown, or other
agcggagngccgaaagcggagctcgaaactgactggaaacttcagtggcgcggagactcgccagtttcaaccccggaaacttttctttgcaggaggagaagagaaggggtgcaagcgcccccacttttgctctttttcctcccctcctcctcctctccaattcgcctccccccacttggagcgggcagctgtgaactggccaccccgcgccttcctaagtgctcgccgcggtagccggccgacgcgccagcttccccgggagccgcttgctccgcatccgggcagccgaggggagaggagccngcgcctcgagtccccgagccgccgcggcttctcgcctttcccggccaccagccccctgccccgggcccgcgtatgaatctcctggaccccttcatgaagatgaccgacgagcaggagaagggcctgtccggcgcccccagccccaccatgtccgaggactccgcgggctcgccctgcccgtcgggctccggctcggacaccgagaacacgcggccccaggagaacacgttccccaagggcgagcccgatctgaagaaggagagcgaggaggacaagttccccgtgtgcatccgcgaggcggtcagncaggtgctcaaaggctacgactggacgctggtgcccatgccggtgcgcgtcaacggctccagcaagaacaagccgcacgtcaagcggcccatgaacgccttcatggtgtgggcgcaggcggcgcgcaggaagctcgcggaccagtacccgcacttgcacaacgccgagctcagcaagacgctgggcaagctctggagacttctgaacgagagcgagaagcggcccttcgtggaggaggcggagcggctgcgcgtgcagcacaagaaggaccacccggattacaagtaccagccgcgnngnnngnngtcggtgaagaacgggcaggcggaggcagaggaggccacggagcagacgcacatctcccccaacgccatcttcaaggcgctgcaggccgactcgccacactcctcctccggcatgagcgaggtgcactcccccggcgagcactcggggcaatcccagggcccaccgaccccacccaccacccccaaaaccgacgtgcagccgggcaaggctgacctgaagcgagaggggcgccccttgccagaggggggcagacagccccctatcgacttccgcgacgtggacatcggcgagctgagcagcgacgtcatctccaacatcgagaccttcgatgtcaacgagtttgaccagtacctgccgcccaacggccacccgggggtgccggccacgcacggccaggtcacctacacgggcagctacggcatcagcagcaccgcggccaccccggcgagcgcgggccacgtgtggatgtccaagcagcaggcgccgccgccacccccgcagcagcccccacaggccccgccggccccgcaggcgcccccgcagccgcaggcggcgcccccacagcagccggcggcacccccgcagcagccacaggcgcacacgctgaccacgctgagcagcgagccgggccagtcccagcgaacgcacatcaagacggagcagctgagccccagccactacagcgagcagcagcagcactcgccccaacagatcgcctacagccccttcaacctcccacactacagcccctcctacccgcccatcacccgctcacagtacgactacaccgaccaccagaactccagctcctactacagccacgcggcaggccagggcaccggcctctactccaccttcacctacatgaaccccgctcagcgccccatgtacacccccatcgccgacacctctggggtcccttccatcccgcagacccacagcccccagcactgggaacaacccgtctacacacagctcactcgaccttgaggaggcctcccacgaagggcgangatggccgagatgatcctaaaaataaccgaagaaagagaggaccaaccagaattccctttggacatttgtgtttttttgtttttttattttgttttgttttttcttcttcttcttcttccttaaagacatttaagctaaaggcaactcgtacccaaatttccaagacacaaacatgacctatccaagcgcattacccacttgtggccaatcagtggccaggccaaccttggctaaatggagcagcgaaatcaacgagaaactggactttttaaaccctcttcagagcaagcgtggaggatgatggagaatcgtgtgatcagtgtgctaaatctctctgcctgtttggactttgtaattatttttttagcagtaattaaagaaaaaagtcctctgtgaggaatattctctattttaaatatttttagtatgtactgtgtatgattcattaccattttgaggggatttatacatatttttagataaaattaaatgctcttatttttccaacagctaaactactcttagttgaacagtgtgccctagcttttcttgcaaccagagtatttttgtacagatttgctttctcttacaaaaagaaaaaaaaaatcctgttgtattaacatttaaaaacagaattgtgttatgtgatcagttttgggggttaactttgcttaattcctcaggctttgcgatttaaggaggagctgccttaaaaaaaaanntaaaggccttattttgcaattatgggagtaaacaatagtctagagaagcatttggtaagctttatcntatatatattttttaaagaagagaaanacaccttgagccttaaaacggtgctgctgggaaacatttgcactcttttagtgcatttcctcctgcctttgcttgttcactgcagtcttaagaaagaggtaaaaggcaagcaaaggagatgaaatctgttctgggaatgtttcagcagccaataagtgcccgagcacactgcccccggttgcctgcctgggccccatgtggaaggcagatgcctgctcgctctgtcacctgtgcctctcagaacaccagcagttaaccttcaagacattccacttgctaaaattatttattttgtaaggagaggttttaattaaaacaaaaaaaaattcttttttttttttttttttccaattttaccttctttaaaataggttgttggagctttcctcaaagggtatggtcatctgttgttaaattatgttcttaactgtaaccagtttttttttatttatctctttaatctttttttattattaaaagcaagtttctttgtattcctcaccctagatttgtataaatgcctttttgtccatcccttttttctttgttgtttttgttgaaaacaaactggaaacttgtttctttttttgtataaatgagagattgcaaatgtagtgtatcactgagtcatttgcagtgttttctgccacagacctttgggctgccttatattgtgtgtgtgtgtgggtgtgtgtgtgttttgacacaaaaacaatgcaagcatgtgtcatccatatttctctncatcttctcttggagtgagggaggctacctggaggggatcagcccactgacagaccttaatcttaattactgctgtggctagagagtttgaggattgctttttaaaaaagacagcaaacttttttttttatttaaaaaaagatatattaacagttttagaagtcagtagaataaaatcttaaagcactcataatatggcatccttcaatttctgtataaaagcagatctttttaaaaaagatacttctgtaacttaagaaacctggcatttaaatcatattttgtctttaggtaaaagctttggtttgtgttcgtgttttgtttgtttcacttgtttccctcccagccccaaaccttttgttctctccgtgaaacttacctttccctttttctttctctttttttttttngtatattattgtttacaataaatatacattgcattaaaaaaaaaaaaaaaaaaannnnnnnnnnnnaaaaaaaaaaaaaaaaaaaaaggggggaaaaaaaaccaaaaagggccaaaaagggagaggaagaaaaaanaaaggcccggcggnaaaaaacggcagggcgggggaaaaacccgggcgaaaccaaacttggggggcgtggggggaacaatcccctttttttctcaattgtggtaaatggcctgaaaaa

SEQ ID NO: 123 - DNA, 4910 bp, Homo sapiens
tagacgcaccctctgaagatggtgactccctcctgagaagctggaccccttggtaaaagacaaggccttctccaagaagaatatgaaagtgttactcagacttatttgtttcatagctctactgatttcttctctggaggctgataaatgcaaggaacgtgaagaaaaaataattttagtgtcatctgcaaatgaaattgatgttcgtccctgtcctcttaacccaaatgaacacaaaggcactataacttggtataaagatgacagcaagacacctgtatctacagaacaagcctccaggattcatcaacacaaagagaaactttggtttgttcctgctaaggtggaggattcaggacattactattgcgtggtaagaaattcatcttactgcctcagaattaaaataagtgcaaaatttgtggagaatgagcctaacttatgttataatgcacaagccatatttaagcagaaactacccgttgcaggagacggaggacttgtgtgcccttatatggagttttttaaaaatgaaaataatgagttacctaaattacagtggtataaggattgcaaacctctacttcttgacaatatacactttagtggagtcaaagataggctcatcgtgatgaatgtggctgaaaagcatagagggaactatacttgtcatgcatcctacacatacttgggcaagcaatatcctattacccgggtaatagaatttattactctagaggaaaacaaacccacaaggcctgtgattgtgagcccagctaatgagacaatggaagtagacttgggatcccagatacaattgatctgtaatgtcaccggccagttgagtgacattgcttactggaagtggaatgggtcagtaattgatgaagatgacccagtgctaggggaagactattacagtgtggaaaatcctgcaaacaaaagaaggagtaccctcatcacagtgcttaatatatcggaaattgaaagtagattttataaacatccatttacctgttttgccaagaatacacatggtatagatgcagcatatatccagttaatatatccagtcactaatttccagaagcacatgattggtatatgtgtcacgttgacagtcataattgtgtgttctgttttcatctataaaatcttcaagattgacattgtgctttggtacagggattcctgctatgattttctcccaataaaagcttcagatggaaagacctatgacgcatatatactgtatccaaagactgttggggaagggtctacctctgactgtgatatttttgtgtttaaagtcttgcctgaggtcttggaaaaacagtgtggatataagctgttcatttatggaagggatgactacgttggggaagacattgttgaggtcattaatgaaaacgtaaagaaaagcagaagactgattatcattttagtcagagaaacatcaggcttcagctggctgggtggttcatctgaagagcaaatagccatgtataatgctcttgttcaggatggaattaaagttgtcctgcttgagctggagaaaatccaagactatgagaaaatgccagaatcgattaaattcattaagcagaaacatggggctatccgctggtcaggggactttacacagggaccacagtctgcaaagacaaggttctggaagaatgtcaggtaccacatgccagtccagcgacggtcaccttcatctaaacaccagttactgtcaccagccactaaggagaaactgcaaagagaggctcacgtgcctctcgggtagcatggagaagttgccaagagttctttaggtgcctcctgtcttatggcgttgcaggccaggttatgcctcatgctgacttgcagagttcatggaatgtaactatatcatcctttatccctgaggtcacctggaatcagattattaagggaataagccatgacgtcaatagcagcccagggcacttcagagtagagggcttgggaagatcttttaaaaaggcagtaggcccggtgtggtggctcacgcctataatcccagcactttgggaggctgaagtgggtggatcaccagaggtcaggagttcgagaccagcccagccaacatggcaaaaccccatctctactaaaaatacaaaaatgagctaggcatggtggcacacgcctgtaatcccagctacacctgaggctgaggcaggagaattgcttgaaccggggagacggaggttgcagtgagccgagtttgggccactgcactctagcctggcaacagagcaagactccgtctcaaaaaaagggcaataaatgccctctctgaatgtttgaactgccaagaaaaggcatggagacagcgaactagaagaaagggcaagaaggaaatagccaccgtctacagatggcttagttaagtcatccacagcccaagggcggggctatgccttgtctggggaccctgtagagtcactgaccctggagcggctctcctgagaggtgctgcaggcaaagtgagactgacacctcactgaggaagggagacatattcttggagaactttccatctgcttgtattttccatacacatccccagccagaagttagtgtccgaagaccgaattttattttacagagcttgaaaactcacttcaatgaacaaagggattctccaggattccaaagttttgaagtcatcttagctttccacaggagggagagaacttaaaaaagcaacagtagcagggaattgatccacttcttaatgctttcctccctggcatgaccatcctgtcctttgttattatcctgcattttacgtctttggaggaacagctccctagtggcttcctccgtctgcaatgtcccttgcacagcccacacatgaaccatccttcccatgatgccgctcttctgtcatcccgctcctgctgaaacacctcccaggggctccacctgttcaggagctgaagcccatgctttcccaccagcatgtcactcccagaccacctccctgccctgtcctccagcttcccctcgctgtcctgctgtgtgaattcccaggttggcctggtggccatgtcgcctgcccccagcactcctctgtctctgctcttgcctcgacccttcctcctcctttgcctaggaggccttctcgcattttctctagctgatcagaattttaccaaaattcagaacatcctccaattccacagtctctgggagactttccctaagaggcgacttcctctccagccttctctctctggtcaggcccactgcagagatggtggtgagcacatctgggaggctggtctccctccagctggaattgctgctctctgagggagaggctgtggtggctgtctctgtccctcactgccttccaggagcaatttgcacatgtaacatagatttatgtaatgctttatgtttaaaaacattccccaattatcttatttaatttttgcaattattctaattttatatatagagaaagtgacctattttttaaaaaaatcacactctaagttctattgaacctaggacttgagcctccatttctggcttctagtctggtgttctgagtacttgatttcaggtcaataacggtcccccctcactccacactggcacgtttgtgagaagaaatgacattttgctaggaagtgaccgagtctaggaatgcttttattcaagacaccaaattccaaacttctaaatgttggaattttcaaaaattgtgtttagattttatgaaaaactcttctactttcatctattctttccctagaggcaaacatttcttaaaatgtttcattttcattaaaaatgaaagccaaatttatatgccaccgattgcaggacacaagcacagttttaagagttgtatgaacatggagaggacttttggtttttatatttctcgtatttaatatgggtgaacaccaacttttatttggaataataattttcctcctaaacaaaaacacattgagtttaagtctctgactcttgcctttccacctgctttctcctgggcccgctttgcctgcttgaaggaacagtgctgttctggagctgctgttccaacagacagggcctagctttcatttgacacacagactacagccagaagcccatggagcagggatgtcacgtcttgaaaagcctattagatgttttacaaatttaattttgcagattattttagtctgtcatccagaaaatgtgtcagcatgcatagtgctaagaaagcaagccaatttggaaacttaggttagtgacaaaattggccagagagtgggggtgatgatgaccaagaattacaagtagaatggcagctggaatttaaggagggacaagaatcaatggataagcgtgggtggaggaagatccaaacagaaaagtgcaaagttattccccatcttccaagggttgaattctggaggaagaagacacattcctagttccccgtgaacttcctttgacttattgtccccactaaaacaaaacaaaaaacttttaatgccttccacattaattagattttcttgcagtttttttatggcatttttttaaagatgccctaagtgttgaagaagagtttgcaaatgcaacaaaaatatttaattaccggttgttaaaactggtttagcacaatttatattttccctctcttgcctttcttatttgcaataaaaggtattgagccattttttaaatgacatttttgataaattatgtttgtactagttgatgaaggagttttttttaacctgtttatataattttgcagcagaagccaaattttttgtatattaaagcaccaaattcatgtacagcatgcatcacggatcaatagactgtacttattttccaataaaattttcaaactttgtactgttaaa

SEQ ID NO: 124 - DNA, 783 bp, Homo sapiens
ggcacgagcgagttcctgtctctctgccaacgccgcccggatggcttcccaaaaccgcgacccagccgccactagcgtcgccgccgcccgtaaaggagctgagccgagcgggggcgccgcccggggtccggtgggcaaaaggctacagcaggagctgatgaccctcatgatgtctggcgataaagggatttctgccttccctgaatcagacaaccttttcaaatgggtagggaccatccatggagcagctggaacagtatatgaagacctgaggtataagctctcgctagagttccccagtggctacccttacaatgcgcccacagtgaagttcctcacgccctgctatcaccccaacgtggacacccagggtaacatatgcctggacatcctgaaggaaaagtggtctgccctgtatgatgtcaggaccattctgctctccatccagagccttctaggagaacccaacattgatagtcccttgaacacacatgctgccgagctctggaaaaaccccacagcttttaagaagtacctgcaagaaacctactcaaagcaggtcaccagccaggagccctgacccaggctgcccagcctgtccttgtgtcgtctttttaatttttccttagatggtctgtcctttttgtgatttctgtataggactctttatcttgagctgtggtatttttgttttgtttttgtcttttaaattaagcctcggttgagcccttgtatattaaataaatgcatttttgtccttttttaaaaaaaaaaaaaaaaaaa

SEQ ID NO: 125 - DNA, 1967 bp, Homo sapiens
  modified_base (1289)..(1289): a, c, g, t, unknown, or other
  modified_base (1766)..(1766): a, c, g, t, unknown, or other
  modified_base (1915)..(1915): a, c, g, t, unknown, or other
  modified_base (1917)..(1920): a, c, g, t, unknown, or other
ggggggggggggcacttggcttcaaagctggctcttggaaattgagcggagagcgacgcggcttgttgtagctgccgctgcggccgccgcggaataataagccgggatctaccatacccattgactaactatggaagattataccaaaatagagaaaattggagaaggtacctatggagttgtgtataagggtagacacaaaactacaggtcaagtggtagccatgaaaaaaatcagactagaaagtgaagaggaaggggttcctagtactgcaattcgggaaatttctctattaaaggaacttcgtcatccaaatatagtcagtcttcaggatgtgcttatgcaggattccaggttatatctcatctttgagtttctttccatggatctgaagaaatacttggattctatccctcctggtcagtacatggattcttcacttgttaagagttatttataccaaatcctacaggggattgtgttttgtcactctagaagagttcttcacagagacttaaaacctcaaaatctcttgattgatgacaaaggaacaattaaactggctgattttggccttgccagagcttttggaatacctatcagagtatatacacatgaggtagtaacactctggtacagatctccagaagtattgctggggtcagctcgttactcaactccagttgacatttggagtataggcaccatatttgctgaactagcaactaagaaaccacttttccatggggattcagaaattgatcaactcttcaggattttcagagctttgggcactcccaataatgaagtgtggccagaagtggaatctttacaggactataagaatacatttcccaaatggaaaccaggaagcctagcatcccatgtcaaaaacttggatgaaaatggcttggatttgctctcgaaaatgttaatctatgatccagccaaacgaatttctggcaaaatggcactgaatcatccatattttaatgatttggacaatcagattaagaagatgtagctttctgacaaaaagtttccatatgttatgtcaacagatagttgtgtttttattgttaactcttgtctatttttgtcttatatatatttctttgttatcaaacttcagctgtacttcgtcttctaatttcaaaaatataacttaaaaatgtaaatattctatatgaatttaaatataattctgtaaatgtgtgtaggtctcactgtaacaactatttgttactataataaaactataatattgatgtcaggaatcaggaaaaaantttgagttggcttaaatcatctcagtccttatggcagttttattttcctgtagttggaactactaaaatttaggaaaatgctaagttcaagtttcgtaatgctttgaagtatttttatgctctgaatgtttaaatgttctcatcagtttcttgccatgttgttaactatacaacctggctaaagatgaatatttttctactggtattttaatttttgacctaaatgtttaagcattcggaatgagaaaactatacagatttgagaaatgatgctaaatttataggagttttcagtaacttaaaaagctaacatgagagcatgccaaaatttgctaagtcttacaaagatcaagggctgtccgcaacagggaagaacagttttgaaaatttatgaactatcttatttttaggtaggttttgaaagctttttgtctaagtgaattcttatgccttggtcagagtaataactgaaggagntgcttatcttggctttcgagtctgagtttaaaactacacattttgacatagtgtttattagcagccatctaaaaaggctctaatgtatatttaactaaaattactagctttgggaattaaactgtttaacaaataaaaaaaaaaaaaanannnntacctataagcagcctaatttgaattatttgctccatctacatagtg

SEQ ID NO: 126 - DNA, 1220 bp, Homo sapiens
  modified_base (4)..(4): a, c, g, t, unknown, or other
  modified_base (9)..(11): a, c, g, t, unknown, or other
  modified_base (13)..(13): a, c, g, t, unknown, or other
  modified_base (16)..(16): a, c, g, t, unknown, or other
agcngagtnnnantcngccccagcggaggtgaaggacgtccttccccaggagccgactggccaatcacaggcaggaagatgaaggttctgtgggctgcgttgctggtcacattcctggcaggatgccaggccaaggtggagcaagcggtggagacagagccggagcccgagctgcgccagcagaccgagtggcagagcggccagcgctgggaactggcactgggtcgcttttgggattacctgcgctgggtgcagacactgtctgagcaggtgcaggaggagctgctcagctcccaggtcacccaggaactgagggcgctgatggacgagaccatgaaggagttgaaggcctacaaatcggaactggaggaacaactgaccccggtggcggaggagacgcgggcacggctgtccaaggagctgcaggcggcgcaggcccggctgggcgcggacatggaggacgtgtgcggccgcctggtgcagtaccgcggcgaggtgcaggccatgctcggccagagcaccgaggagctgcgggtgcgcctcgcctcccacctgcgcaagctgcgtaagcggctcctccgcgatgcccgatgacctgcagaagcgcctggcagtgtaccaggccggggcccgcgagggcgccgagcgcggcctcagcgccatccgcgagcgcctggggcccctggtggaacagggccgcgtgcgggccgccactgtgggctccctggccggccagccgctacaggagcgggcccaggcctggggcgagcggctgcgcgcgcggatggaggagatgggcagccggacccgcgaccgcctggacgaggtgaaggagcaggtggcggaggtgcgcgccaagctggaggagcaggcccagcagatacgcctgcaggccgaggccttccaggcccgcctcaagagctggttcgagcccctggtggaagacatgcagcgccagtgggccgggctggtggagaaggtgcaggctgccgtgggcaccagcgccgcccctgtgcccagcgacaatcactgaacgccgaagcctgcagccatgcgaccccacgccaccccgtgcctcctgcctccgcgcagcctgcagcgggagaccctgtccccgccccagccgtcctcctggggtggaccctagtttaataaagattcaccaagtttcacgcaaaaaaaaaaaaaaaaaaaaaaaaaaaaaaaaaaaaaaaaaaaac

SEQ ID NO: 127 - DNA, 728 bp, Homo sapiens
gcggcctcagatgaatgcggctgttaagacctgcaataatccagaatggctactctgatctatgttgataaggaaaatggagaaccaggcacccgtgtggttgctaaggatgggctgaagctggggtctggaccttcaatcaaagccttagatgggagatctcaagtttcaacaccacgttttggcaaaacgttcgatgccccaccagccttacctaaagctactagaaaggctttgggaactgtcaacagagctacagaaaagtctgtaaagaccaagggacccctcaaacaaaaacagccaagcttttctgccaaaaagatgactgagaagactgttaaagcaaaaagctctgttcctgcctcagatgatgcctatccagaaatagaaaaattctttcccttcaatcctctagactttgagagttttgacctgcctgaagagcaccagattgcgcacctccccttgagtggagtgcctctcatgatccttgacgaggagagagagcttgaaaagctgtttcagctgggccccccttcacctgtgaagatgccctctccaccatgggaatccaatctgttgcagtctccttcaagcattctgtcgaccctggatgttgaattgccacctgtttgctgtgacatagatatttaaatttcttagtgcttcagagtttgtgtgtatttgtattaataaagcattcttcaacagaaaaaaaaaaaaaaaaa

SEQ ID NO: 128 - DNA, 3138 bp, Homo sapiens
  modified_base (90)..(90): a, c, g, t, unknown, or other
  modified_base (129)..(129): a, c, g, t, unknown, or other
  modified_base (143)..(143): a, c, g, t, unknown, or other
  modified_base (149)..(149): a, c, g, t, unknown, or other
  modified_base (160)..(161): a, c, g, t, unknown, or other
  modified_base (164)..(164): a, c, g, t, unknown, or other
  modified_base (173)..(173): a, c, g, t, unknown, or other
  modified_base (187)..(187): a, c, g, t, unknown, or other
  modified_base (191)..(191): a, c, g, t, unknown, or other
  modified_base (195)..(195): a, c, g, t, unknown, or other
  modified_base (210)..(210): a, c, g, t, unknown, or other
  modified_base (231)..(231): a, c, g, t, unknown, or other
  modified_base (238)..(238): a, c, g, t, unknown, or other
  modified_base (242)..(242): a, c, g, t, unknown, or other
  modified_base (244)..(246): a, c, g, t, unknown, or other
  modified_base (272)..(273): a, c, g, t, unknown, or other
  modified_base (284)..(284): a, c, g, t, unknown, or other
  modified_base (363)..(363): a, c, g, t, unknown, or other
  modified_base (366)..(367): a, c, g, t, unknown, or other
  modified_base (685)..(685): a, c, g, t, unknown, or other
  modified_base (694)..(694): a, c, g, t, unknown, or other
  modified_base (700)..(700): a, c, g, t, unknown, or other
  modified_base (711)..(711): a, c, g, t, unknown, or other
  modified_base (724)..(724): a, c, g, t, unknown, or other
  modified_base (1658)..(1658): a, c, g, t, unknown, or other
  modified_base (3115)..(3115): a, c, g, t, unknown, or other
  modified_base (3118)..(3120): a, c, g, t, unknown, or other
agacaatttttctgaaatttttcttctctcaagcttcttggcctgacaagcataagtgcctctgccttccttcgccgcacctctcgccanccgccgcctctgcggcttacttgaaggcttgcttgcttnttgccgccgccgcngccgcngccgccgcttnngcntgcccacancgctcccgagctanggancaangccccatccgagcgncgtgggcgtcgtaggggaganggagggncggntnnnctccgctgcaacagcaaagtttgagnncgaagcctagncgactcgcagcgccggtcccgcagtttcacctcttttttttttaactccgccagaggaccccgacccacaggtcccggnttnntccgctggtcaaagtgcgtgcggagtagttggcaaagttgagagcggagacgtctctgggaacagctgtttgcgttccgggcggaggcggcgcgctgagctccttggccttgagccagcgagcctagaaggaggatggaggttttgggccccaggggaggacacagagacggcgggatggcgcagggacttgaggcttgagatcccgtccttcagctcaggtcccgtcgcgcttttaccccttcccggtgacctcaacccctttataccgaccccacctctttggagccgggagtaccgcccctgtagggggaggggnagaggaggngatttngaacgcggatnggatcgtctgggnacccgtagttgggaacagcggaacgctggtcccggggactgagtaaggtgtctggatcggagggaggttcgggtgggcatcgggcggctggaagagctcgactcgtcccgctgggaaagcgcgagtctgagtggaaccctggacgacttgcagagcggctggcgcagtcatggcggactactggaagtcacagccaaagaaattctgtgattactgcaagtgctggatagcagacaataggcctagtgttgaatttcatgaaagaggaaagaatcataaggaaaatgtggcaaaaaggatcagtgagattaaacagaaaagcctggataaggcaaaggaagaagaaaaggcatcaaaggagtttgctgcaatggaggcagctgccctgaaagcataccaagaggatttgaaaagacttggcttagagtcagaaattttggagccaagcataacaccagtaaccagcactatcccacctacctcgacatcaaatcaacagaaagaaaagaaagaaaagaagaaaagaaaaaaagatccttcaaagggcagatgggtagaaggcataacctctgagggttaccattactattatgatcttatctcaggagcatctcagtgggagaaacctgaaggatttcaaggagacttaaaaaagacagcagtgaagaccgtttgggtagaaggtttaagtgaagatggttttacctattactataatacagaaacaggagaatccagatgggagaaacctgatgatttcattccacacactagtgatctgccttctagtaaggtcaatgaaaattcacttggcaccctagatgaatccaaatcatcagattcgcatagtgattctgatggggaacaggaagcagaagaaggaggggtctctacagagacagaaaagccaaaaataaagtttaaggaaaaaaantaaaaatagtgatggaggaagtgacccagaaacacagaaagaaaaaagtattcagaaacagaattcattaggttcaaatgaagaaaaatcgaaaactcttaagaaatcaaacccatatggagaatggcaagaaattaaacaagaggttgagtctcatgaggaggtagatttggaacttccaagcactgaaaatgagtatgtatcaacttcagaagctgatggtggcggagaacccaaagtggtatttaaagaaaaaacagtcacttctcttggagttatggcagatggagtggccccagtcttcaaaaagagaagaactgaaaatggaaaatctagaaatttaaggcaacgaggtgatgatcaatagttgcaggagagctttttgtacatgcttttaggacagaatggagacttatacacccaaagtttatctgtgtttgtttgtaagtattatgatgctaaaaatttagatttattctaaatgtatttgatgtgaattaaaataaatattttttcatgtgaaatttattttggttcctaaaatggaagcctaccacattgcattgtaatacagtgtattatgttcagtgtctaaaaactgctaattaagtcataatttaagatgctatgtatctgttatttaaaacatggagaaacagggcctttattccattcatattcataagagcatatttatcctgcattgaaaatgcattacttttgcacattgatattaactgttgtccaacaaataagtatcggagtacgtgagaatattcccagcccagtgatgatttggttctgaggctgatgtgagaaagctgatgtaaaaaatgtatgcatattggcttaccttactcaatttaaagtcaaaagccaacagccaggagcagctcaggtacttcagatgtgcttaatatggagtgaaaactggaccagaggtggaaagatgtatttgccccagttcacttcaaagcagcaaacgttgtttaagcattttagtttgaaccaggcattgtgttaggaatccagggataaagatgaatgaaatgtatttctgttcttcaggagttcacattctagcatatgccttttttcccccagtcatgcactctttttagcagtcttatatgtactagaaaagattttttaaagtttatttaaagctgtgtagatgaaggcttgatctaaaatagtataaggtctccagcttcagtaaaagtttttagtgtttacttaaattagtaatttctcactttctgtctggttaaaatgtcttaaaaagtagaattttcttctttaatccgtttagtagttacctcccttttacttttcaaattcacaaaattacatttctcataaattgtatagtatttaacttataatagttaatatttgtctttttaagatgactgtacatgtaagaaaaaagcttattaaaaacttgatcaaagaanaannnaaaaaaaaaaaaaaagtt

SEQ ID NO: 129 - DNA, 2907 bp, Homo sapiens
  modified_base (1894)..(1894): a, c, g, t, unknown, or other
  modified_base (1990)..(1990): a, c, g, t, unknown, or other
  modified_base (2388)..(2388): a, c, g, t, unknown, or other
  modified_base (2506)..(2506): a, c, g, t, unknown, or other
  modified_base (2509)..(2509): a, c, g, t, unknown, or other
ggaattcggcacgagggacggcgggccccgcttccggcccgggcgtcgtgcgtgacccagcggcgtcacagccgaggaagcggcccggccgggagggcggggaggcgcgcggcgatcggacacgatggcgggaggaggcgggagtagcgacggcagcgggcgggcagctggcaggcgggcgtcccgcagtagcgggcgggcccggcgggggcgccacgagccggggctggggggcccggcggagcgcggcgcgggggaggcacggctggaagaggcagtcaatcgctgggtgctcaagttctacttccacgaggcgctgcgggcctttcggggtagccggtacggggacttcagacagatccgggacatcatgcaggctttgcttgtcaggcccttggggaaggagcacaccgtgtcccgattgctgcgggttatgcagtgtctgtcgcggattgaagaaggggaaaatttagactgttcctttgatatggaggctgagctcacaccactggaatcagctatcaatgtgctggagatgattaaaacggaatttacactgacagaagcagtggtcgaatccagtagaaaactggtcaaggaagctgctgtcattatttgtatcaaaaacaaagaatttgaaaaggcttcaaaaattttgaaaaaacatatgtccaaggaccccacaactcagaagctgagaaatgatctcctgaatattattcgagaaaagaacttggcccatcctgttatccagaacttttcatatgagaccttccagcagaagatgctgcgcttcctggagagccacctggatgacgccgagccctacctcctcacgatggccaaaaaggctttgaaatctgagtccgctgcctcaagtacagggaaggaagataaacagccagcaccagggcctgtggaaaagccacccagagaacccgcaaggcagctacggaatcctccaaccaccattggaatgatgactctgaaagcagctttcaagactctgtctggtgcacaggattctgaggcagcctttgcaaaactggaccagaaggatctggttcttcctactcaagctctcccagcatcaccagccctcaaaaacaagagacccagaaaagatgaaaacgaaagttcagccccggctgacggtgagggtggctcggaactgcagcccaagaacaagcgcatgacaataagcagattggtcttggaggaggacagccagagtactgagcccagcgcaggcctcaactcctcccaggaggccgcttcagcgccaccatccaagcccaccgttctcaaccaacccctccctggagagaagaatcccaaagtacccaaaggcaagtggaacagctctaatggggttgaagaaaaggagacttgggtggaagaggatgaactgtttcaagttcaggcagcaccagatgaagacagtacaaccaatataacaaaaaagcagaagtggactgtagaagaaagcgagtgggtcaaggctggagtgcagaaatatggggaaggaaactgggctgccatttctaaaaattacccatttgttaaccgaacagctgtgatgattaaggatcgctggcggaccatgaaaagacttggcatgaactgaaacaggctttcatttccacagaattcacaggagcatggttcctaataatagcccctgatagtctgctctttctttctttttcttttttttttttttttgagacagagtctcgctctgtcacccaggctggagtgcagtggcgtgatctcggctcactgcgacctccgtctcccgggctcacgccattctcctgcctcagcctccgagtagctgggactacaggcgcccgccatcacgcccggctaatgttttgtatttttagtaaanacggggtttcaccgtgttggccaggatggtctcgatctcctgacctcgtgatccacccaactcggcctcccaaagtgctgggattacaggcatganccaccgcgcctggcatctgctgtttctttcagaagctgggctgggatgagaattttgggcaacctccttcgacgtgggggaggtcccatttccacttcatcactgttggagatcatggagctaagaagcagagccaagtccacccatgtccttggcagagatgacggcacacagcttgtgcagtgccagaatatcattagcgtttcccttctttagtggtttgcttaaatttaaatccctggtaatctgtagaaccttctcctaggaaatggtgaagtctattaggagccacttgtgactccatgacctgttaaaaccagcaatgtgagtattatttggagtaaatttgttccacgtcaagttctggccttctgatgcaaatgcaaaggaacttagtntgttatgaacccaggttgatgacagaccagtccttgtggaataagattccctttaaaaactctttagccagtcgtgacatcaaccctagacctgtctgccttggcatttgctgtcaanatntgctgggctatgtaggcaggttaatcctccacttctcatgtggttgaaccagtgtgttttttggtaaaatggtgattgtagataagattagttccctgatcccctgccccctgtcccctgcctcttttcccaattcccttccttatgctggacttttaaagcttaaaaaaaatccgattgaatataaatgcctaatttcattcttttgtgaaatggttgcttcctcctgattccctaattgtgctgtgttcgtgtcttgcactggaattcaacattcccttctccttttgtactgtgttgtgcttgctgtctctcccggacacccttaaagactgtctttttagcaaaaaatttcagtaaagtgttttctgtaatctttttttaaaaaaaaaaaaaaa

SEQ ID NO: 130 - DNA, 1044 bp, Homo sapiens
tgctgctctcctcccgctccgtcctcctcgcctgccaccggtgcacccagtccgctcacccagcccagtccgtccggtcctcaccgcctgccggccggcccaccccccaccgcaggccatggacgccatcaagaagaagatgcagatgctgaagctggacaaggagaacgccatcgaccgcgccgagcaggccgaagccgacaagaagcaagctgaggaccgctgcaagcagctggaggaggagcagcaggccctccagaagaagctgaaggggacagaggatgaggtggaaaagtattctgaatccgtgaaggaggcccaggagaaactggagcaggccgagaagaaggccactgatgctgaggcagatgtggcctccctgaaccgccgcattcagctggttgaggaggagctggaccgggcccaggagcgcctggctacagccctgcagaagctggaggaggccgagaaggcggctgatgagagcgagagaggaatgaaggtcatcgaaaaccgggccatgaaggatgaggagaagatggaactgcaggagatgcagctgaaggaggccaagcacatcgctgaggattcagaccgcaaatatgaagaggtggccaggaagctggtgatcctggaaggagagctggagcgctcggaggagagggctgaggtggccgagagccgagccagacagctggaggaggaacttcgaaccatggaccaggccctcaagtccctgatggcctcagaggaggagtattccaccaaagaagataaatatgaagaggagatcaaactgttggaggagaagctgaaggaggctgagacccgagcagagtttgccgagaggtctgtggcaaagttggagaaaaccatcgatgacctagaagagaccttggccagtgccaaggaggagaacgtcgagattcaccagaccttggaccagaccctgctggaactcaacaacctgtgagggccagccccacccccagccaggctatggttgccaccccaacccaataaaactgatgttactagcctctc

SEQ ID NO: 131 - DNA, 2148 bp, Homo sapiens
gcttcagggtacagctcccccgcagccagaagccgggcctgcagcccctcagcaccgctccgggacaccccacccgcttcccaggcgtgacctgtcaacagcaacttcgcggtgtggtgaactctctgaggaaaaaccattttgattattactctcagacgtgcgtggcaacaagtgactgagacctagaaatccaagcgttggaggtcctgaggccagcctaagtcgcttcaaaatggaacgaaggcgtttgtggggttccattcagagccgatacatcagcatgagtgtgtggacaagcccacggagacttgtggagctggcagggcagagcctgctgaaggatgaggccctggccattgccgccctggagttgctgcccagggagctcttcccgccactcttcatggcagcctttgacgggagacacagccagaccctgaaggcaatggtgcaggcctggcccttcacctgcctccctctgggagtgctgatgaagggacaacatcttcacctggagaccttcaaagctgtgcttgatggacttgatgtgctccttgcccaggaggttcgccccaggaggtggaaacttcaagtgctggatttacggaagaactctcatcaggacttctggactgtatggtctggaaacagggccagtctgtactcatttccagagccagaagcagctcagcccatgacaaagaagcgaaaagtagatggtttgagcacagaggcagagcagcccttcattccagtagaggtgctcgtagacctgttcctcaaggaaggtgcctgtgatgaattgttctcctacctcattgagaaagtgaagcgaaagaaaaatgtactacgcctgtgctgtaagaagctgaagatttttgcaatgcccatgcaggatatcaagatgatcctgaaaatggtgcagctggactctattgaagatttggaagtgacttgtacctggaagctacccaccttggcgaaattttctccttacctgggccagatgattaatctgcgtagactcctcctctcccacatccatgcatcttcctacatttccccggagaaggaagagcagtatatcgcccagttcacctctcagttcctcagtctgcagtgcctgcaggctctctatgtggactctttatttttccttagaggccgcctggatcagttgctcaggcacgtgatgaaccccttggaaaccctctcaataactaactgccggctttcggaaggggatgtgatgcatctgtcccagagtcccagcgtcagtcagctaagtgtcctgagtctaagtggggtcatgctgaccgatgtaagtcccgagcccctccaagctctgctggagagagcctctgccaccctccaggacctggtctttgatgagtgtgggatcacggatgatcagctccttgccctcctgccttccctgagccactgctcccagcttacaaccttaagcttctacgggaattccatctccatatctgccttgcagagtctcctgcagcacctcatcgggctgagcaatctgacccacgtgctgtatcctgtccccctggagagttatgaggacatccatggtaccctccacctggagaggcttgcctatctgcatgccaggctcagggagttgctgtgtgagttggggcggcccagcatggtctggcttagtgccaacccctgtcctcactgtggggacagaaccttctatgacccggagcccatcctgtgcccctgtttcatgcctaactagctgggtgcacatatcaaatgcttcattctgcatacttggacactaaagccaggatgtgcatgcatcttgaagcaacaaagcagccacagtttcagacaaatgttcagtgtgagtgaggaaaacatgttcagtgaggaaaaaacattcagacaaatgttcagtgaggaaaaaaaggggaagttggggataggcagatgttgacttgaggagttaatgtgatctttggggagatacatcttatagagttagaaatagaatctgaatttctaaagggagattctggcttgggaagtacatgtaggagttaatccctgtgtagactgttgtaaagaaactgttgaaaataaagagaagcaatgtgaagcaaaaaaaaaaaaaaaaaa

SEQ ID NO: 132 - DNA, 591 bp, Homo sapiens
cagaacggccgatctccagcccaagatgattccagcagtggtcttgctcttactccttttggttgaacaagcagcggccctgggagagcctcagctctgctatatcctggatgccatcctgtttctgtatggaattgtcctcaccctcctctactgtcgactgaagatccaagtgcgaaaggcagctataaccagctatgagaaatcagatggtgtttacacgggcctgagcaccaggaaccaggagacttacgagactctgaagcatgagaaaccaccacagtagctttagaatagatgcggtcatattcttctttggcttctggttcttccagccctcatggttggcatcacatatgcctgcatgccattaacaccagctggccctacccctataatgatcctgtgtcctaaattaatatacaccagtggttcctcctccctgttaaagactaatgctcagatgctgtttacggatatttatattctagtctcactctcttgtcccacccttcttctcttccccattcccaactccagctaaaatatgggaagggagaacccccaataaaactgccatggactggactc

SEQ ID NO: 133 - DNA, 2981 bp, Homo sapiens
  modified_base (16)..(16): a, c, g, t, unknown, or other
  modified_base (50)..(50): a, c, g, t, unknown, or other
  modified_base (1286)..(1286): a, c, g, t, unknown, or other
  modified_base (1313)..(1314): a, c, g, t, unknown, or other
  modified_base (1319)..(1319): a, c, g, t, unknown, or other
  modified_base (1333)..(1333): a, c, g, t, unknown, or other
  modified_base (1348)..(1350): a, c, g, t, unknown, or other
  modified_base (1352)..(1352): a, c, g, t, unknown, or other
  modified_base (1354)..(1358): a, c, g, t, unknown, or other
  modified_base (1360)..(1362): a, c, g, t, unknown, or other
  modified_base (1364)..(1364): a, c, g, t, unknown, or other
  modified_base (2133)..(2133): a, c, g, t, unknown, or other
  modified_base (2740)..(2740): a, c, g, t, unknown, or other
  modified_base (2774)..(2778): a, c, g, t, unknown, or other
gaagacgctcagaggnattctgacaatatctttaccggagaagaggcaangtacgctcaaagccgaagccacagctcctcctgccgcatttctttcctgcttgcgaattccaagctgttaaataagatgtgcaaagggcttgcaggtctgccggcttcttgcttgaggagtgcaaaagatatgaaacatcggctaggtttcctgctgcaaaaatctgattcctgtgaacacaattcttcccacaacaagaaggacaaagtggttatttgccagagagtgagccaagaggaagtcaagaaatgggctgaatcactggaaaacctgattagtcatgaatgtgggctggcagctttcaaagctttcttgaagtctgaatatagtgaggagaatattgacttctggatcagctgtgaagagtacaagaaaatcaaatcaccatctaaactaagtcccaaggccaaaaagatctataatgaattcatctcagtccaggcaaccaaagaggtgaacctggattcttgcaccagggaagagacaagccggaacatgctagagcctacaataacctgctttgatgaggcccagaagaagattttcaacctgatggagaaggattcctaccgccgcttcctcaagtctcgattctatcttgatttggtcaacccgtccagctgtggggcagaaaagcagaaaggagccaagagttcagcagactgtgcttccctggtccctcagtgtgcctaattctcacctgaaggcagagggatgaaatgccaagactctatgctctggaaaacctgaggccaaatattgatctgtattaagctccagtgctttatccacattgtagcctaatattcatgctgcctgccatgtgtgagtcacttctacgcataaactagatatagcttttggtgtttgagtgttcatcagggtgggaccccattccagtccaattttcctaagtttctttgagggttccatgggagcaaatatctaaataatggcctggtaggtctggattttcaaagattgttggcagtttcctcctcccaacagttttacctcgggatggttggttagtgcatgtcacatgacatccacatgcacatgtattctgttggccagcacgttctccagactctagatgtttagatgaggttgagctatgatatgtgcttgtgtgtatgtctatgtgtatatattatatatacattagacacacatatacattatttctgtatatagatgtctgtgtatacatatgtatgtgtgagtgtatgtanacacacacacacacacacacacacttnngcaanagtgatgggaaagnccctaggtgctcatnnntngnnnnngnnnangtacttacatgggtgttttgatctctgttctttcatactacatttgaacagggcaaaatgaactaactgccatgtaggctaagaaagaaatgctaacctgtggaaagttggttttgtaaaattccatggatcttgctggagaagcatccaaggaacttcatgcttgatttgaccactgacagcctccaccttgagcactattctaaggagcaaataccttagctcccttgagctggttttctctgatggcacttttgagctcctaagctgccagccttcccttcttttcctgggtgctcagggcatgcttattagcagctgggttggtatggagttggcagacaggatgttcaacttaatgaagaaatacagctaaggccttgccagcaacacctgccgtaagttactggctgagtgagggcatagaagttaaaggttactgtttttatcctctatccttttttcctttcctgatcaaggtgctcttctcattttttcctgagaaccttagccatcagatgaggctccttagtttattgtggttggttgttttttctttataatggctctgggctatatgcccatatttataaaccagcagcaggggaaagattatattttataagagggaacaaattttcacaatttgaaaagcccacataagttttctcttttaaggtagaatcttgttaatttcattccaaacatcggggctaacagagactggaggcatttctttttaggctctgagactaaatgagaggaaaanaaaagaaaaaaaaatgattgtctaaccaattgtgagaattactgtttgaaacttttcaaggcacattgaaatacttgaaaacttctcatttatgttatttatgatgttattttgtacgtgttattattattatattgttttataaatggaggtacaggatatcacctgaattattaatgaatgcccaggaagtaattttcttctcattcttctaaaactactgcctttcaaagtgcacacacacgcgtccacatacactgcattcgttgctccagtataaattacatgcatgagcacctttctggcttttaagccaatataatgggctgcaaaatgaagacaccagagtgtatgcatacaaatctcactgtattaaagatgcaggttttctaattgtacccttcttgtctctctggcaatcttgcccttaatatccctggagttcctcatcagtgtcattttctgttatacacagttccacaattttgtctctagttgacttcaaatgtgtaactttattggtcttgccctattataattgtcatgactttcagattgtatctgaactcacagactgctgtcttactaataggtctggaaggtcacnctgaatgagaagtaaattattttatgtaatacannnnngagtgtgtttttcagttgtatttccctgttatttcatcactatttccaatggtgagcttgcctgctcatgctccctggacagaatactccttccttttgcatgcctgtttctatcatgtgcttgataggcctcaaagctaatgcttccagtgaaacacacgcatcttaataataagggtaaataaacgctccatatgaaacta

SEQ ID NO: 134 - DNA, 371 bp, Homo sapiens
ggacagaggaggactacgcgtgtccttgggcggagaagggaggtgactccggcggaagaggacaaggcagaatgcaggcccttcgggtgtcccaggcgctgatccgctccttcagctccaccgcccggaaccgctttcagaaccgagtgcgcgagaaacagaagctcttccaggaggacaatgacatcccgttgtacctgaagggcggcatcgttgacaacatcctgtaccgagtgacaatgacgctgtgtctgggcggcactgtctacagcttgtactcccttggctgggcctccttccccaggaattaagaccaagaagcctggggggcctgagagacttgaacaagtgtcaataaacgctggcctctg

SEQ ID NO: 135 - DNA, 1900 bp, Homo sapiens
acaactctcagaggagcattgcccgtcagacagcaactcagagaataaccagagaacaaccagattgaaacaatggaggatctttgtgtggcaaacacactctttgccctcaatttattcaagcatctggcaaaagcaagccccacccagaacctcttcctctccccatggagcatctcgtccaccatggccatggtctacatgggctccaggggcagcaccgaagaccagatggccaaggtgcttcagtttaatgaagtgggagccaatgcagttacccccatgactccagagaactttaccagctgtgggttcatgcagcagatccagaagggtagttatcctgatgcgattttgcaggcacaagctgcagataaaatccattcatccttccgctctctcagctctgcaatcaatgcatccacagggaattatttactggaaagtgtcaataagctgtttggtgagaagtctgcgagcttccgggaagaatatattcgactctgtcagaaatattactcctcagaaccccaggcagtagacttcctagaatgtgcagaagaagctagaaaaaagattaattcctgggtcaagactcaaaccaaaggcaaaatcccaaacttgttacctgaaggttctgtagatggggataccaggatggtcctggtgaatgctgtctacttcaaaggaaagtggaaaactccatttgagaagaaactaaatgggctttatcctttccgtgtaaactcggctcagcgcacacctgtacagatgatgtacttgcgtgaaaagctaaacattggatacatagaagacctaaaggctcagattctagaactcccatatgctggagatgttagcatgttcttgttgcttccagatgaaattgccgatgtgtccactggcttggagctgctggaaagtgaaataacctatgacaaactcaacaagtggaccagcaaagacaaaatggctgaagatgaagttgaggtatacataccccagttcaaattagaagagcattatgaactcagatccattctgagaagcatgggcatggaggacgccttcaacaagggacgggccaatttctcagggatgtcggagaggaatgacctgtttctttctgaagtgttccaccaagccatggtggatgtgaatgaggagggcactgaagcagccgctggcacaggaggtgttatgacagggagaactggacatggaggcccacagtttgtggcagatcatccttttctttttcttattatgcataagataaccaactgcattttatttttcggcagattttcctcaccctaaaactaagcgtgctgcttctgcaaaagatttttgtagatgagctgtgtgcctcagaattgctatttcaaattgccaaaaatttagagatgttttctacatatttctgctcttctgaacaacttctgctacccactaaataaaaacacagaaataattagacaattgtctattataacatgacaaccctattaatcatttggtcttctaaaatgggatcatgcccatttagattttccttactatcagtttatttttataacattaacttttactttgttatttattattttatataatggtgagtttttaaattattgctcactgcctatttaatgtagctaataaagttatagaagcagatgatctgttaatttcctatctaataaatgcctttaattgttctcataatgaagaataagtaggtaccctccatgcccttctgtaataaatatctggaaaaaacattaaacaataggcaaatatatgttatgtgcatttctagaaatacataacacatatatatgtctgtatcttatattcaattgcaagtatataataaataaacctgcttccaaacaac

SEQ ID NO: 136 - DNA, 2222 bp, Homo sapiens
gagtcccggcagtgcgggactccggtagccgcccctccggtagccgcccctcctccccccgcgccgccgccctatatgttgcccgccgcggcctctggggcatggagcacgctgcccagccctggcgatggcaacggcgacgggggtggcggaggagcgcctgctggccgcgctcgcctacctgcagtgcgccgtgggctgcgcggtcttcgcgcggaatcgtcagacgaactcagtgtacggccgccacgcgctgcccagccacaggctccgagtgccggcgcgggccgcctgggtggtgcaggagctgccctcgctggccctgccgctctaccagtacgccagcgagtccgccccgcgtctccgcagcgcgcccaactgcatcctcctggccatgttcctcgtccactacgggcatcggtgcttaatttacccgtttctgatgcgaggaggaaagcctatgccactgttggcatgtacaatggcgattatgttctgtacctgtaacggctatttgcaaagcagatacttgagccattgtgcagtgtatgctgatgactgggtaacagatccccgttttctaataggttttggcttgtggttaacaggcatgttgataaacatccattcagatcatatcctaaggaatctcagaaaaccaggagatactggatacaaaataccaaggggaggcttatttgaatacgtaactgcagccaactattttggagaaatcatggagtggtgtggctatgccctggccagctggtctgtccaaggcgcggcttttgctttcttcacgttttgttttttatctggtagagcaaaagagcatcatgagtggtacctccggaaatttgaagagtatccaaagttcagaaaaattataattccatttttgttttaagtgcgtttttcatgaaattatcttcaacttgaagctttccaatggcgcttctctatggactttgtaaataagttatatctttgtaattttcctgctactttatcattttcaagatgtcctctaggaattttttttctagtaattttgcaatctacctaataagtacctaaatacgctgaaatggaggttgaatatcctactgtgtaacaggtcagaatttcaagctctgggtaataactgctgatattttttctaatttcaaatttacctcttttggctatgtcttgccaagtgtgtatgagactagactttacaactgtctttgatggcattttcagaacaataaatgtcacaatcccttctatagccccctacagtgatctcttcaaggtcaactgcagtgttgcttccctccccctatagggctggaatctgtctaggagccctctctcggaggccatagaggctgggggtagccattgtgcagtcatggcccgggggaaacttgccaaccttcgtgtcaggtgctgtgtataagtggagaacttggggatagaggaggaagctcctcgtggcccttccaaggtgaggcaaaggcatctggacttgttccagcccagcccaccgggtgacatcaccgggcagggaggggtgctggtggtggttcatacggagtaagctgctctgcctgtgtgagtggctcctgggccctaaacaggcacctttaggccatgggtcactcaccgtgagccatcaatgtgctctggtctgacatggtttctctctgtcttctagtctagacctagtttttttgttctgttccccacgtatggatatagtagagattgttgtctgtgaaatttctcttttgtagattttgagttttcccttgtagtgtaaagaatgatcactttctgtaacaataacaagaccactttttaagatttatcctgtttgttctttgttgattgaaacataataattgttaaaattctctacagccttctttttcttccatagctaatcttccttctaatagtttttgctttctgttttgctgttgttgctttgcaaagctttcccctcatagcctgtacctgttatcaatataaaataatcttcctgttgaatgcttcatgacttgaattctactttgataaaaacattgccatactgctttttatcttgatgaattcatctggcattgctttgccttatcatctcatctggagtttttaaatgccatttgtttcagttgtctttaacaacataataaatagactttgccatttaaaaaaaaaaaaaaaaaaaaaaa

SEQ ID NO: 137 - DNA, 1443 bp, Homo sapiens
gtggctgcagcagcagcggcggcggaaaccctaaagtccgagtccggactacgagtgcgtggcctcctaatccggatcctagtcctgagcgtgtctgtgtgcgagtggacggtcccggacgcgatgaccctgaacggcggcggcagcggagcgggcgggagccgcggtgggggccaggagcgcgagcgccgtcggggcagcacaccctggggccccgccccgccgctgcaccgccgcagcatgccggtggacgagcgcgacctgcaggcggcgctgaccccgggtgccctgacggcggccgcggccgggacggggacccagggtcccaggctggactggcccgaggactccgaggactcgctcagctcagggggcagcgactcagacgagagcgtttacaaggtgctgctgctgggggcgcccggcgtgggcaagagcgccctggcgcgcatcttcggcggtgtggaggacgggcctgaagcagaggcagcagggcacacctatgatcgctccattgtagtggacggagaagaggcatcactcatggtctacgacatttgggagcaggacgggggccgctggttgcccggccactgcatggccatgggggatgcctatgtcattgtgtactcagtgacggacaagggcagcttcgagaaggcctcagaactgcgggtccagctgcggcgtgcacggcaaacagatgatgtgcccatcatcctcgtgggcaacaagagcgacctggtgcgctctcgtgaggtctcggtggatgagggccgggcctgcgcggtggtctttgactgcaagttcattgagacatcagcggcattgcaccacaatgtccaggcgctgtttgaaggtgtcgtgcgccagatacgcctgcgcagggacagcaaagaagccaacgcacgacggcaagcaggcacccggaggcgagagagccttggcaaaaaggcgaagcgcttcttgggccgcatcgtagctcgtaacagccgcaagatggcctttcgcgccaaatccaagtcctgccacgacctctcggttctctaggtcccacccgctcccactatggtgggagacgaacggaagggttggtgggctggcccagccaactgccccgggtgcctcagagcaggctcagactctgggtccctcggagctgccagccgggcacccccaacctcatggtcatggacagatagacagtgctgccctgcgaagtggctctcaggggccagtgagggctgggcccacagagatgcatgcgcaggctcatatgcgtcccaagcagccgcagcgcagccgccgggcaggcctgcgtgccgggagaggactctgccttttttcacagcccgggtgtgcctgccctggagggaggctcttcagtgcggtagctacttgtttacatgcagatttttgtaataaaggctatttcctgataaa

SEQ ID NO: 138 - DNA, 1443 bp, Homo sapiens; identical to SEQ ID NO: 137

SEQ ID NO: 139 - DNA, 1670 bp, Homo sapiens
attgagagtggctctaacaagtgccatttttccttgttagctttcatttctcagccctttacaagattaaaatagtctgcagtttaatctctccaaagctttacggacagtgattctgtcctaaacaagacagtgactccaggatttctgaagactattgtggaagaagcatccattaaggccaagctataacatcagaaatggtgaatgaatacaagaaaattcttttgctgaaaggatttgagctcatggatgattatcattttacatcaattaagtccttactggcctatgatttaggactaactacaaaaatgcaagaggaatacaacagaattaagattacagatttgatggaaaaaaagttccaaggcgttgcctgtctagacaaactaatagaacttgccaaagatatgccatcacttaaaaaccttgttaacaatcttcgaaaagagaagtcaaaagttgctaagaaaattaaaacacaagaaaaagctccagtgaaaaaaataaaccaggaagaagtgggtcttgcggcacctgcacccaccgcaagaaacaaactgacatcggaagcaagagggaggattcctgtagctcagaaaagaaaaactccaaacaaagaaaagactgaagccaaaaggaataaggtgtcccaagagcagagtaagcccccaggtccctcaggagccagcacatctgcagctgtggatcatcccccactaccccagacctcatcatcaactccatccaacacttcgtttactccgaatcaggaaacccaggcccaacggcaggtggatgcaagaagaaatgttccccaaaacgacccagtgacagtggtggtactgaaagcaacagcgccatttaaatacgagtccccagaaaatgggaaaagcacaatgtttcatgctacagtggccagtaagactcaatatttccatgtgaaagtcttcgacatcaacttgaaagagaaatttgtaaggaagaaggtcattaccatatctgattactctgaatgtaaaggagtaatggaaataaaggaagcatcatctgtgtctgactttaatcaaaattttgaggtcccaaacagaattatcgaaatagcaaataaaactcccaagatcagtcaactttacaagcaagcatctggaacaatggtgtatgggttgtttatgttacaaaagaaaagcgtacacaagaagaacacaatttatgaaatacaggataatacaggatccatggatgtagtggggagtggaaaatggcacaatatcaagtgtgagaaaggagataaacttcgactcttctgccttcaactgagaacagttgaccgcaagctgaaactggtgtgtggaagtcacagcttcatcaaggtcatcaaggccaagaaaaacaaggaaggaccaatgaatgttaattgaaatatgaaagctgaaatgcaacaaacaacttccgcttaaaacaattaagttgttaataactgtgattttgtaaatttcagtaattcatttaaatgatgtttcagtagatatattctagcatattaagagcttttataactgagttatagattagtttgctttctggaataaaattttcttcttatactcttccttttttttagatattacattttgcttttatgacattcacgaggcaaaaaaccg

SEQ ID NO: 140 - DNA, 787 bp, Homo sapiens
ctgaaggtcacccgggcggccccctcactgaccctccaaacgcccctgtcctcgccctgcctcctgccattcccggcctgagtctcagcatggcggatgggagcagcgatgcggctagggaacctcgccctgcaccagccccaatcagacgccgctcctccaactaccgcgcttatgccacggagccgcacgccaagaaaaaatctaagatctccgcctcgagaaaattgcagctgaagactctgctgctgcagattgcaaagcaagagctggagcgagaggcggaggagcggcgcggagagaaggggcgcgctctgagcacccgctgccagccgctggagttgaccgggctgggcttcgcggagctgcaggacttgtgccgacagctccacgcccgtgtggacaaggtggatgaagagagatacgacatagaggcaaaagtcaccaagaacatcacggagattgcagatctgactcagaagatctttgaccttcgaggcaagtttaagcggcccaccctgcggagagtgaggatctctgcagatgccatgatgcaggcgctgctgggggcccgggctaaggagtccctggacctgcgggcccacctcaagcaggtgaagaaggaggacaccgagaaggaaaaccgggaggtgggagactggcggaagaacatcgatgcactgagtggaatggagggccgcaagaaaaagtttgagagctgagccttcctgcctactgcccctgccctgaggagggccactgaggaataaagcttctctctgagctg

SEQ ID NO: 141 - DNA, 1599 bp, Homo sapiens
cactgcttattaaagtacactattcaggcatatcatgtaggtttactttctgtgtttctagagaccaagaagcgggacgttcaccatgggaagaaaatcgctgtaccttctgattgtggggatcctcatagcatattatatttatacgcctctcccagataacgttgaggagccatggagaatgatgtggataaacgcacatctgaaaactatacaaaatttggctacatttgtggagctccatgggagttccatttttatggattcctttaaggttgtcgggagctttgatgaagtcccaccaacctcagatgaaaatgtcactgtgactgagacaaaattcaacaacattcttgttcgggtatatgtgccaaagagaaagtctgaagcactaagaagggggttgttttacatccatggtggaggctggtgcgtgggaagtgctgctctaagtggttatgacttgctgtcaagatggacagcagacagacttgatgctgtcgtcgtatcaaccaactacagattagcacctaagtatcatttcccaattcaatttgaagatgtatataatgccttaaggtggttcttacgtaaaaaagttcttgcaaaatatggtgtgaaccctgagagaatcggtatttctggagatagtgcaggagggaatttagctgcagcagtgactcaacagctccttgatgacccagatgtcaagatcaaactcaagatccagtctttaatttatcctgcccttcagcctcttgatgtagatttaccgtcatatcaagaaaattcaaattttctatttctatccaaatcactcatggtcagattctggagtgaatattttaccactgatagatcacttgaaaaagccatgctttccagacaacatgtacctgtggaatcaagtcatctcttcaaatttattaattggagttccctgctccctgagaggtttataaaaggacatgtttataacaatccaaattatggcagttctgagctggctaaaaaatatccagggttcctagatgtgagggcagcccctttgttggctgatgacaacaaattacgtggcttacccctgacctatgtcatcacctgtcaatatgatctcttaagagatgatggactcatgtatgtcacccgacttcgcaacactggggttcaggtgactcataaccatgttgaggatggattccatggagcattttcatttctgggacttaaaattagtcacagacttataaatcagtatattgagtggctaaaggaaaatctatagtaaaacatgtagctataacatattttaaaaataaaatctgaaaacctcagaaaatttcgattagaaattggtctttcttagaatggtctagttaagttccacatgtagcataattcttaaataggcacttttctgttttttttttcttactgtgggatttcatttcaattttctacattgtctatctgctttttcggagattttccttcttacactgttaatcttattttaaaaaatattacattcttgtatactttatttttgtgagttggctactatttacgatgcaagagaataaatgtgagcaaagattg

SEQ ID NO: 142 - DNA, 787 bp, Homo sapiens; identical to SEQ ID NO: 140

SEQ ID NO: 143 - DNA, 1599 bp, Homo sapiens; identical to SEQ ID NO: 141

SEQ ID NO: 144 - DNA, 400 bp, Homo sapiens
ccactagccaagccgcgcgtccagttgcttgaagaagcccgttcaccgcctccagctgctgctctcctcgacatggaccctgagacctgcccctgcccttctggtggctcctgcacctgcgcggactcctgcaagtgcgagggatgcaaatgcacctcctgcaagaagagctgctgctcctgctgccctgcggagtgtgagaagtgtgccaaggactgtgtgtgcaaaggcggagaggcagctgaggcagaagcagagaagtgcagctgctgccagtgaaggcacccctccgtgtggagcactggagatagtgccaggtggctcagtgcccacctatgccctgtggtgaagtgttcctggtgttccctttccctgctgaccttggaggaatgacaataaa

SEQ ID NO: 145 - DNA, 4289 bp, Homo sapiens
gatcaatactgaggccgcgtcgacccccttgagccgagacccccccccagcccagcccccaccccaccccccgcacacgccccaccccccccacgacccagcctcataccgcaccagctgaggcacccaagaggattaccccctggggccctctcccgccccccaaaaaagagaagatcccctctcctggcccatcccttcccttcttccctcccccctccccccgaactttccctctcgcatgcttttcccctgcaccacggatcgcctctcggatgccgcttgcctggaagctgcgttaggagcgagcggcggcggtggcggcggtggcggcggcggcggcagctcgggagtgctatgaccggcaaactcgccgagaagctgccggtgaccatgagcagtttgctaaaccaactgcctgacaatctgtaccccgaggagatccccagcgcgctcaacctcttctccggcagcagcgactcggtagtccattacaatcagatggctacagagaatgtaatggacatcggtctgaccaacgagaagcccaacccggaactctcttactccggctccttccagccagcccccgggaacaagaccgtgacctacttgggaaagttcgccttcgactccccttccaactggtgccaggacaacatcattagcctcatgagcgccggcatcttgggggtgcccccggcttcaggggcgctaagcacgcagacgtccacggccagcatggtgcagccaccgcagggtgacgtggaggccatgtatcccgcgctacccccctactccaactgcggcgacctctactcagagcccgtgtctttccacgacccccagggcaatcccgggctcgcctattccccccaggattaccaatcggccaagccggcgttggacagcaatctcttccccatgattcctgactacaacctctaccaccaccccaacgacatgggctccattccggagcacaagcccttccagggcatggaccccatccgggtcaacccgccccctactacccctctggagaccatcaaggcattcaaagacaagcagatccacccgggctttggcagcctgccccagccgccgctcaccctcaagcccatccggccccgcaagtaccccaaccggcctagcaagacaccgctccacgaacggccccacgcgtgcccggccgagggctgcgaccgccgtttcagccgttcggacgagctgacccggcacctgcgcatccacacgggccacaagcccttccagtgccggatctgcatgcggagcttcagccgcagcgaccacctcaccactcacatccgcactcatacgggcgagaagccctttgcctgcgagttctgcgggcgcaagtttgcgcgcagcgacgagcgcaagcgccacgccaagatccacctcaagcaaaaggagaagaaggcggagaagggcggtgcaccctctgcatcctcggcgccccccgtgtcgctggcccccgtggtcaccacctgcgcctgaggatcgggcccccagatccccacttttcccctccagtgcctcccggctgctagcctgaaagcagcgggaaagccagccacggaggcgtaggggccgcgccctggcctctccatggacgtgcggccccttgcttccccttcgatgcccccggttcccaacctttcacgccggccagcggtcaggggccagggctggaggcgccttcccctcgcggtcccccacttagccaaggcgtgggggcggaaaggtggcgtctagcccgctttgttcagttcggatcgccttgatccaggggccgccgggccgcgccaaggacctgcaagggactgaaggcggagcccatccaaccctcgcccgacccaaacacctcattgtttcccccacgtctccctctataccccctcgaagactcgagagggggagggggtaaggagcgcaccaaagcgcagagcttgctgcccgccgcacgcacgcgcgcctgcgtgcggggatgcgcgcgagtgtgtgcgtgctcgcgtgtgtgtgtatgtgtgtgtgtgagtgtgtgtgtgtgcgcgcgcgcaagcgtgtgtgtttaagactcttgagctgaactgggctgtgtttaccccaaactcttccccacctcgggtccccaagccgctgggagatgtcccatgctgggggtccgcacgtggctggaggaggtggtcttccatccgctctgaaatcatgtttcttagagaaatgcctcggatgccgccgacgcggtgctgctgccgccgcttcgggtttggcccctcagaacccctccttttctgagcgcttccctcttaggcctcagggcagtttgatctgtggggagaaagagcagccatcgctgagcctgccttttaaaatatatgtgtatttccttagccccactctaagaaatctatgttcctgagtttgccccctgccctcccactccttccccttttcccctctaaaccttctcccatctctttcaaaatcttttcccagaaaggcaggcttcaaccagccactccagctttgtgtcttctctcaattacatagcaatttctccttcccaccatcatggggaagctggctctgcttttgccctttgtcatcaccaacacaacagatagaatttaaatataagtatatggtgtgcgtgtgtatgtatgtgtatgtatatgcatgcatgtgtataaagatgcacatgcgtacatatacataacatacacacaatatgtattcctagcaaaataaaatctctaaggtacttggttatccagtgcagtgcaccggaataaagagaatttgtaggcgtatacagctttaaatgatttattttttatgaaaatgttaactgatgagattatatctacatacgtgtgttatgtgtgtggatatagatgcacacatatctgtacatatacatgtgagtgtacatatatacacatatacacatctatgtatggatatgtgtgtatacacatatacacatctctgtccaaaatttcctcaaagatatggggattttttcatgaatccatgtggatgaatgaggtgtctcctttccatacccagtctcaccttctccccaccctacctcacctcttctcaggcacccctcttccccagctgtcctgccagcccttctcgtacagggtggctcctttgaagtggagtaatagggaaggttgctctctgccacagcttgcagcatggtcttgactgaatgtactgttcctgttagcgttacttctcctgtggtcagtaagttgcccagagagaaggaacaaaggtctggagtttacagaatgtctgtttttaaagtcactttatgcgttttccacttttttcttttttaagaaaaagaagtaccatttttgttttgttttgttttgatttttggtggtggataaataatactaaaaggactctagtggaaaggggggatatcgaagagcagggggttgtgaatttccaggtacttggactttttgtagaagtagagagaagaagatgaagtttgccaggagggcccatattttttcagctgaagggtaaaatctttctttgcagagacagtattttgctgaatactttttataatgtgatgattattaaaaaagcaaaaattttggtcacttccaagctagaaggaggaatcagataccctttaatattttttcctcgctccttctggtatatgcatgtcactgcatgataattgagttttcctttgttttaataaaactgttctcagacattaagctaaactaagagaaaaataactttgttgccaaaaggttgtgctatccagattttttatatgtctgcatgtttaaaaaaaaaaaagcaacaaaagaaaatgcactctaacttatgtgaactgagagaaaaaaatcaggttttaaacaggaaaacctatggggaatgatattttttgaaagacttttgtataaagttgagtacttagaaaaaagacaaaccagatgtaatatattttgtggatgtttttatttcttggatttatagtaccttatactaaggttaaaaaaatatgcttgatattgtgaaaaggtgaaattcttcaccaacatttcatttgctcctttgtcatattgtaatgccaatataatatagttaatgaaaacagcatttttaaaaaccgaaatattgaaatggtgtaatgttgtaccatttgcactgtgagcaaatgctaatacagtaaatatattgtgtttgctgacaatcaaaaaaaaaaaaaaaaaaaa

SEQ ID NO: 146 - DNA, 1837 bp, Homo sapiens
ctcaaactcagctcacttgagagtctcctcccgccagctgtggaaagaactttgcgtctctccagcaatgcatctccttgcgattctgttttgtgctctctggtctgcagtgttggccgagaactcggatgattatgatctcatgtatgtgaatttggacaacgaaatagacaatggactccatcccactgaggaccccacgccgtgcgactgcggtcaggagcactcggaatgggacaagctcttcatcatgctggagaactcgcagatgagagagcgcatgctgctgcaagccacggacgacgtcctgcggggcgagctgcagaggctgcgggaggagctgggccggctcgcggaaagcctggcgaggccgtgcgcgccgggggctcccgcagaggccaggctgaccagtgctctggacgagctgctgcaggcgacccgcgacgcgggccgcaggctggcgcgtatggagggcgcggaggcgcagcgcccagaggaggcggggcgcgccctggccgcggtgctagaggagctgcggcagacgcgagccgacctgcacgcggtgcagggctgggctgcccggagctggctgccggcaggttgtgaaacagctattttattcccaatgcgttccaagaagatttttggaagcgtgcatccagtgagaccaatgaggcttgagtcttttagtgcctgcatttgggtcaaagccacagatgtattaaacaaaaccatcctgttttcctatggcacaaagaggaatccatatgaaatccagctgtatctcagctaccaatccatagtgtttgtggtgggtggagaggagaacaaactggttgctgaagccatggtttccctgggaaggtggacccacctgtgcggcacctggaattcagaggaagggctcacatccttgtgggtaaatggtgaactggcggctaccactgttgagatggccacaggtcacattgttcctgagggaggaatcctgcagattggccaagaaaagaatggctgctgtgtgggtggtggctttgatgaaacattagccttctctgggagactcacaggcttcaatatctgggatagtgttcttagcaatgaagagataagagagaccggaggagcagagtcttgtcacatccgggggaatattgttgggtggggagtcacagagatccagccacatggaggagctcagtatgtttcataaatgttgtgaaactccacttgaagccaaagaaagaaactcacacttaaaacacatgccagttgggaaggtctgaaaactcagtgcataataggaacacttgagactaatgaaagagagagttgagaccaatctttatttgtactggccaaatactgaataaacagttgaaggaaagacattggaaaaagcttttgaggataatgttactagactttatgccatggtgctttcagtttaatgctgtgtctctgtcagataaactctcaaataattaaaaaggactgtattgttgaacagagggacaattgttttacttttctttggttaattttgttttggccagagatgaattttacattggaagaataacaaaataagatttgttgtccattgttcattgttattggtatgtaccttattacaaaaaaaatgatgaaaacatatttatactacaaggtgacttaacaactataaatgtagtttatgtgttataatcgaatgtcacgtttttgagaagatagtcatataagttatattgcaaaagggatttgtattaatttaagactatttttgtaaagctctactgtaaataaaatattttataaaactaaaaaaaaaaaaaaa

SEQ ID NO: 147 - DNA, 1062 bp, Homo sapiens
gctctgttctacagcacactaccagaagacagcagaaatgaaaagcatttactttgtggctgggttatttgtaatgctggtacaaggcagctggcaacgttcccttcaagacacagaggagaaatccagatcattctcagcttcccaggcagacccactcagtgatcctgatcagatgaacgaggacaagcgccattcacagggcacattcaccagtgactacagcaagtatctggactccaggcgtgcccaagattttgtgcagtggttgatgaataccaagaggaacaggaataacattgccaaacgtcacgatgaatttgagagacatgctgaagggacctttaccagtgatgtaagttcttatttggaaggccaagctgccaaggaattcattgcttggctggtgaaaggccgaggaaggcgagatttcccagaagaggtcgccattgttgaagaacttggccgcagacatgctgatggttctttctctgatgagatgaacaccattcttgataatcttgccgccagggactttataaactggttgattcagaccaaaatcactgacaggaaataactatatcactattcaagatcatcttcacaacatcacctgctagccacgtgggatgtttgaaatgttaagtcctgtaaatttaagaggtgtattctgaggccacattgctttgcatgccaataaataaattttcttttagtgttgtgtagccaaaaattacaaatggaataaagttttatcaaaatattgctaaaatatcagctttaaaatatgaaagtgctagattctgttattttcttcttattttggatgaagtaccccaacctgtttacatttagcgataaaattatttttctatgatataatttgtaaatgtaaattattccgatctgacatatctgcattataataataggagaatagaagaactggtagccacagtggtgaaattggaaagagaactttcttcctgaaacctttgtcttaaaaatactcagctttcaatgtatcaaagatacaattaaataaaattttcaagcttc

SEQ ID NO: 148 - DNA, 3003 bp, Homo sapiens
cgaagtcaagacgtctggaaagaattacccagtcctggcttcgagcagcccattgaaccagagacttgaaacagccccagccaaagacttttctcccaattctgcgcttcctgggttctgctgagtcttccacaggctttttttttttttttttttttttaagacgaaaaagagattttctgttatcgggggcagaaagactgaagcacaaaaaaaaaaaaaaagaaaagaaaagaaaagaaaaaagaaaagttaatttatttttaaagcataatttttttaagaattagactgaagtgcaacggaaacataaagagaatattagtgaaattattttttaaagtggggaagaatcaaacatttaagactcccctatcctttttaaatgttgtttttaaatttcttattttttttggccggtcgtctcaaattcatctgatctcttattacctcaattttggaaactgcccgccaccgaccctccgggaccacacagacaggctgaggacgactttatgaccaagagctgaacaagatgcattgtgagaggtttctatgtatcctgagaataattggaaccacactctttggagtctctctcctccttggaatcacagctgcttatattgttggctaccagtttatccaaacggataattactatttctcttttggactgtatggtgcctttttggcatcacacctcatcatccaaagcctgtttgcctttttggagcaccgaaaaatgaaaaaatccctagaaacccccataaagttgaacaaaacagttgccctttgcatcgctgcctatcaagaagatccagactacttaaggaaatgtttgcaatctgtgaaaaggctaacctaccctgggattaaagttgtcatggtcatagatgggaactcagaagatgacctttacatgatggacatcttcagtgaagtcatgggcagagacaaatcagccacttatatctggaagaacaacttccacgaaaagggtcccggtgagacagatgagtcacataaagaaagctcgcaacacgtaacgcaattggtcttgtccaacaaaagtatctgcatcatgcaaaaatggggtggaaaaagagaagtcatgtacacagccttcagagcactgggacgaagtgtggattatgtacaggtttgtgattcagacactatgcttgacccagcctcatctgtggagatggtaaaagttttagaagaagatcccatggttggaggtgttgggggagatgtccagattttaaacaagtacgattcctggatctcattcctcagcagtgtaagatattggatggcttttaatatagaaagggcctgtcagtcttattttgggtgtgttcagtgcattagtggacctctgggaatgtacagaaactccttgttgcatgagtttgtggaagattggtacaatcaagaatttatgggcaaccaatgtagctttggtgatgacaggcatctcacgaaccgggtgctgagcctgggctatgcaacaaaatacacagctcgatctaagtgccttactgaaacacctatagagtatctcagatggctaaaccagcagacccgttggagcaagtcctacttccgagaatggctgtacaatgcaatgtggtttcacaaacatcacttgtggatgacctacgaagcgattatcactggattctttcctttctttctcattgccacagtaatccagctcttctaccggggtaaaatttggaacattctcctcttcttgttaactgtccagctagtaggtctcataaaatcatcttttgccagctgccttagaggaaatatcgtcatggtcttcatgtctctctactcagtgttatacatgtcgagtttacttcccgccaagatgtttgcaattgcaacaataaacaaagctgggtggggcacatcaggaaggaaaaccattgttgttaatttcataggactcattccagtatcagtttggtttacaatcctcctgggtggtgtgattttcaccatttataaggagtctaaaaggccattttcagaatccaaacagacagttctaattgttggaacgttgctctatgcatgctattgggtcatgcttttgacgctgtatgtagttctcatcaataagtgtggcaggcggaagaagggacaacaatatgacatggtgcttgatgtatgatcttccatgttttgacgtttgcagtcacacacaacaccttagttcctctaggggctgtacagtattgtggcatcagataatgccaccaaaggagacatatcactgctgctgggacttgaacaaagacatttatatgggtttattttcattctgccaaagtaaaacaatacatcaacaagaagaaactcagatttaacctgttatttctatgaaaatgggatgaattctttgtttatgcactttttccttactgtgcatccgcctgaaagtgttttggcctatatacctcactagccatgctttatgtgggttatcatggaagaaaaggattttggaaactcaaggaaaagttctttcaacctatacaacctaacttatggactgtttgatagatgataattttttttttttaggaaggattttctttttaactttaccaaatgaaatgccaaaggaagttttaaaggccgtggctgtgctgtatttgatataattgtactgtgtttttaaattgtgtatgccaatcttaaagacaaattttgcatattctctattttacttttctgccaaaataaacctgttcttccttttttaaaataaaataagttcttaaaaaatttatacttaaaaaatcctgcccaaaatgtgaagcttggttgactgatgttcatgatagaaagaataaaatgtttctctctctctaccttttaaaattgaatagtttatttctgtgaaagaagtatttaaactttcaatattttaactttttgtttttatttcttttagaaaaggccaatatacctatcgcg

SEQ ID NO: 149 - DNA, 1567 bp, Homo sapiens
gattcacatccattggtcaggggcaaataccactagctctgcatcctcagtcactttgtgccatttcatcaggtcagagccaaaggaaagcttgaaaaatgaagacattagcaggacttgttctgggacttgtcatcttggatgctgctgtgactgccccaactctagagtccatcaactatgactcagaaacctatgatgccaccttagaagacctggataatttgtacaactatgaaaacatacctgttgataaagttgagattgaaatagccacagtaatgccttcagggaacagagagctcctcactccacccccacagcctgagaaggcccaggaagaggaagaggaggaggaatctactcccaggctgattgatggctcttctccccaggagcctgaattcacaggggttctggggccacacacaaatgaagactttccaacctgtctttggtgtacttgtataagtaccaccgtgtactgtgatgaccatgaacttgatgctattcctccgctgccaaagaacaccgcttatttctattcccgctttaacagaattaaaaagatcaacaaaaatgactttgcaagcctaagtgatttaaaaaggattgatctgacatcaaatttaatatctgagattgatgaagatgcattccgaaaactgcctcaacttcgagagcttgtcctgcgtgacaacaaaataaggcagctcccagaattgccaaccacttcgacatttattgatattagcaacaatagacttggaaggaaagggataaagcaagaagcatttaaagacatgtatgatctccatcatctgtacctcactgataacaacttggaccacatccctctgccactcccagaaaatctacgagcccttcacctccagaataacaacattctggaaatgcacgaagatacgttctgcaatggtaaaaatttgacttatattcgtaaggcactagaggacattcgattggatggaaaccctattaatctcagcaaaactccacaagcatacatgtgtctacctcgtctgcctgttgggagccttgtctaatttcagataatggttagcattacgatggctactataaataaaccattcttactgctctcttccaaaacaaaactcagcatgatactttgagattgtgttctgagagatgatatgactacataaaatacaattaaaaatgttataatataatgaaaatgtagtaatttaagaaaacaccagatgagttaggaataaacctataacatttacaaaaagagcaaaactaagtgatagaaaatatttcacacatgttcttatagatcatgtatcacttgcaagttttaggagttcatatcctatatcatttcaaattaagtacataataaagtaaaattttgaaatgaacactttaggtatttttgccaagatttagatgtttttaattaaacttttctcttcctttttttttcactaaggcatgtttattcccctaatccattaaagagcatgaaaaaaagaataaatgtatttgaaaaaaaaaaaaaaaaaaaaaaaaaaaa

SEQ ID NO: 150 - DNA, 2490 bp, Homo sapiens
accagttcgcgccggcggtagacgaggacgccaacagcagcggagaaacgtttctctttcctctcagtttgcgcacaccatggcggcccctgcccagcagactactcagcctggcggcgggaagcgcaaaggcaaggctcagtatgtgctggccaagcgcgctcggcgctgcgacgctggcgggccccgtcagctagagcccgggctacagggcatcctcatcacctgcaatatgaacgagcgcaagtgcgtggaggaggcctacagcctcctcaacgaatacggcgacgacatgtatgggccagaaaagtttacagacaaggatcagcggccctctggaagtgagggagaggatgatgatgcggaggctgccttgaagaaagaagttggtgacattaaggcatctacagagatgaggttaagaagattccagtcagtggaaagtggagcaaataacgttgtcttcatcaggacacttgggatagagcctgagaaattggtgcatcatattctccaggatatgtacaaaaccaagaaaaagaagactcgagttattttgcgaatgttacccatctcaggcacatgcaaggcttttttagaagatatgaaaaaatatgcagaaacatttttggaaccctggtttaaagctccaaacaaagggacatttcagattgtgtacaaatctcgaaataacagtcatgtgaatagagaagaagttatcagagaattggcaggaatagtgtgcaccctcaattcagaaaataaagtggatctcaccaatccacagtacacagtggtagtagaaatcatcaaagctgtctgttgcctgagtgttgtgaaagattacatgttgtttagaaaatacaatctccaggaggtggtgaagagccctaaggatccgtcacagcttaactcaaagcagggaaatggggaagaagctaaactggaatctgcggacaaatcagaccaaaacaacacagcagaaggaaaaaataaccagcaggtaccagagaatactgaggagctggggcagacaaaaccaacgtctaatccacaggtggtaaatgagggaggagccaaacctgaacttgcaagtcaagccacagaaggatccaagtcaaatgaaaatgactcctcataggaagtcatttggtgttggaggtgggtttctcacctggggctctacgagatgttgctggggctccaccttaaattgtgactaaaaacagttttttatttgtgtgctgcactatgctgttctcacagtagtgagcaatgattgcgcagccctgttaacagtttttttagggatctttcagcctttatggtattacgtagaggcagacccatgtgctgctgttgcaaagaggggaggataggagggggatgttggcctctcccaggctcctcttctgcagtgccagctgacttaagggagtgaactacctgtgaagtagaaaatcagagggaagttttcattctaaggaaggagtttttacatgccacagctcagctgtctgcctgccactttgttgtaaacattgcaaaaatgtggatcatgtaggttagaagtgaattgtttagtgaagtttttgtacttttgtgattttcttgtttatgtctgtttttttttttttttttaacatttgtgtgtaatatagctgacagtccagtgtcgcaattttggaaggcaagatgtgagagagacgagaaccattttaggcatagaactacagacatttctgaaaaggttggtgatgaagaacttcagtcttctgagtatacttcagtatactagtgcaacaagggacacaaagaaattctgtcttaataaagaaagctacttctcaagggtattatgtggactcagtccaagctctcctgtcccattgtgcattgtctgtgacatgcaacttacaaaactagcaattgtaacaataaatcacagccacttgacaagaaaggatattcattattttcaaatggcttttggactatcaaaaacagtaaggcttttgttcagaaatcacctttagtcaaaaggtttaagaagcaaattatttagtagcagaacttatctcaggaaaggaaaatatgcatggttggtgagaatctaataacattaaaatgctggggcaagatgcagtacaagttgaagagactttattctcaataagttgatttactgatgatatgtcatatgatgcaaaaaaggttttgtgtcattaactgaaaagtagcagcttctctatccaggatgatgagtcaacaggtttcactaatatttgtcatgctgtagcatttgtaagatttgtaaatgatgaaattcaaagaaaactttttctattgctaggagcctgccagaacaaggccaatatataatgttgtgacatcatatctgataaccagaggtctggtatctacactcctggtgccccatcagtggttgtctccataagtcattttgcgttaaaaaaaaaaaaaaaaaaa

SEQ ID NO: 151 - DNA, 1719 bp, Homo sapiens
ccgaattcgggggcagcagccacattggcagtgaggccgtggcagcgtcagcagcagaggatgccccaggccctggagcgtgcagatggcagctgggcctgggtggtgctgctggccaccatggtgacccagggcctcaccctgggcttccccacgtgtatcggcatcttcttcactgaactgcaatgggagttccaggccagcaacagcgagacctcttggttcccctccatcctcacggctgtgctccacatggcagggcccctgtgcagcatcctggtgggacgcttcggctgccgagtgaccgtgatgctggggggcgtgctggccagcctgggcatggtggccagctccttctctcacaacctcagccagctctacttcacagcaggattcatcacaggcctgggcatgtgcttcagcttccagtcaagcatcacggtgctgggcttctactttgtccgccggcgggtgctggccaacgcgctggcctcgatgggcgtctccctgggcatcaccctctggccgctgctctcccgttaccttctggagaacctgggctggaggggtaccttccttgtcttcggcgggatctttctccactgctgcatctgcggggccatcataaggcctgtggccaccagtgtggcccctgagaccaaagaatgtcccccgccacctcccgagacacctgcacttggctgcctggctgcatgcggccggaccatccagcgccacctggccttcgacatcctgcggcacaacacaggctactgcgtgtacatactgggtgtgatgtggtccgtcctgggcttcccactgccacaagtcttcctggtgccatatgccatgtggcacagcgtggacgagcagcaggcagccctcctcatctccatcatcggcttcagcaacatcttcctgaggcccctagccgggctgatggcaggacggccggcctttgctagccaccgcaagtacctgttcagcctggcactcctgctcaatgggctcactaacctggtgtgtgcggcatcaggtgacttctgggtgctcgtgggctactgcctggcgtacagcgtgtccatgagtggcatcggcgccctcatcttccaggttctcatggacatcgtccccatggatcagttccccagagccctgggactcttcactgtcctggacggccttgctttcctcatctccccaccactggccgggttgctcctggacgccaccaacaactttagctatgttttctacatgtccagcttcttcctcatctcagctgccctcttcatgggtggcagcttctacgccctgcagaagaaggagcaaggcaagcaggctgtcgcggcggatgccctggagcgggatcttttcttggaagccaaagacggtcctgggaagcaacggtcccctgagatcatgtgccagtcttcccgccagccacgtccagctggcgtcaataagcatctttggggatgtcctgcctcctccaggaccagccatgagtggctcttatggccaaaggcggtactgcaggccaagcaaacggctctgggctggaatagccctacctgagtgccctgtttgactccgccactatctgccatgtgagttgggcaaattgttgaccacctctgagccttgaaaaagtaggaggttactttgttagagcaaaataataaaatttaattttaaaaaagaaaaaaaaaaaaaaaa

SEQ ID NO: 152 - DNA, 1123 bp, Homo sapiens
ccgagggccattgagtggcgatggcggcgacggcgagtgccggggccggcgggatggacgggaagccccgtacctcccctaagtccgtcaagttcctgtttgggggcctggccgggatgggagctacagtttttgtccagcccctggacctggtgaagaaccggatgcagttgagcggggaaggggccaagactcgagagtacaaaaccagcttccatgccctcaccagtatcctgaaggcagaaggcctgaggggcatttacactgggctgtcggctggcctgctgcgtcaggccacctacaccactacccgccttggcatctataccgtgctgtttgagcgcctgactggggctgatggtactccccctggctttctgctgaaggctgtgattggcatgaccgcaggtgccactggtgcctttgtgggaacaccagccgaagtggctcttatccgcatgactgccgatggccggcttccagctgaccagcgccgtggctacaaaaatgtgtttaacgccctgattcgaatcacccgggaagagggtgtcctcacactgtggcggggctgcatccctaccatggctcgggccgtcgtcgtcaatgctgcccagctcgcctcctactcccaatccaagcagttcttactggactcaggctacttctctgacaacatcctgtgccacttctgtgccagcatgatcagcggtcttgtcaccactgctgcctccatgcctgtggacattgccaagacccgaatccagaacatgcggatgattgatgggaagccggaatacaagaacgggctggacgtgctgttcaaagttgtccgctacgagggcttcttcagcctgtggaagggcttcacgccgtactatgcccgcctgggcccccacaccgtcctcaccttcatcttcttggagcagatgaacaaggcctacaagcgtctcttcctcagtggctgaagcgtttcagggcacacaggacagcagaagatcccctttgtcagtggggaaaccaaggcagagctgaggggacagggaggagcagaagccatcaagatggtcaaagggcctgcagagggagatgtggccttcctccccctcattgaggactcaataaa

SEQ ID NO: 153 - DNA, 1375 bp, Homo sapiens
tcgaattccggaagccgctcccgacaccctttgcctggctctgtccatattagttcccaggcggccgtcgcgttccagcagcggcacgcagcgcaggcggagcggcagcggggcctcggctctatagagccgagccgctggtacccgcccggtaccgcgcgagccagtgcccctggatcttgcctctgctccgacgccgttccccaccagttagcgacagcgcccgcccctctgaggagacacgaaggtggttccccagccgctcaaatttccggaccaccgcgctttcccctcctcagcctgggctgtgctctctctagaatcctcgggcccccactttcttcccaaactcatcctaaatctctcacacacgcgagtgttcccagccctcaagccagctgctcctcctccgttcattttctgcccctcttcgcaaagcacccccgggatcatcctccgagggcgactttttgagaaatctcggtggagtagtggaccagagcaggggagtttttaaaagccggggcgcgagaaacaggaaggtactatggcttcctcgtctggcaacgatgatgatctcactatccccagagctgctatcaataaaatgatcaaagagactcttcctaatgtccgggtggccaacgatgctcgagagctggtggtgaactgctgcactgaattcattcaccttatatcttctgaagccaatgagatttgtaacaaatcggaaaagaagaccatctcaccagagcatgtcatacaagcactagaaagtttgggatttggctcttacatcagtgaagtaaaagaagtcttgcaagagtgtaaaacagtagcattaaaaagaagaaaggccagttctcgtttggaaaaccttggcattcctgaagaagagttattgagacagcaacaagaattatttgcaaaagctagacagcaacaagcagaattggcccaacaggaatggcttcaaatgcagcaagctgcccaacaagcccagcttgctgctgcctcagccagtgcatctaatcaggcgggatcttctcaggatgaagaagatgatgatgatatctgaaattcaccagctgagtttctatttcttctataaatgtttttccctgcacaacaaaaacagtgaaagaaatgcttatctgtaattttgtatgcatcttggtggacttgtcattggtattctagagatgtctgctataagtttcatctgttgtgtgctatacatgtaaaaactgtctctttgaactattgaaaatttaaggttcagtataatatcaattttgaatttttcctggtgtttatgaaattttagatagcagcaagtcttcgtttgatcataaacagtgtacagataactcaa

SEQ ID NO: 154 - DNA, 2169 bp, Homo sapiens
ccgcggctccccgactcctttcccagaggtgagtgcccgaagccaggagcccggggcgcctaggtctgtgcgctgcggggaacccctaccgccagcctccccgccacccgcgcgcccccaagcccagcgggcgaggccccgggcgccccacagccggcgccgcgccatgctccaccttagcgagttttccgaacccgacgcgctcctcgtcaagtccactgaaggctgttgcgccgaacccagcgctgaattgccccggctgcctgccagggacgctcccgcggccaccggctaccctggagcaggcgacttcttgagctgggctttgaacagctgcggcgcaagtggggacttagccgactcctgcttcctggaggggcctgcgcccacaccccctcccggcctcagctacagcggtagcttcttcattcaggcagtgcccgaacacccgcacgacccggaggcactcttcaacctcatgtcgggcgtcttaggcctggcacccttccccggtccagaggcagcagcgtccagatccccgctggatgccccttttcctgcggggtccgatgccttgctgccgggtccgccggacctttactccccggatctgggcgctgcccctttcccagaggcgttctgggaggcctcgccttgcgcgggtgccccctcgcagtgcctgtatgagcctcagctctccccgcccgacgtcaagcccggcctccggcggcctcccgcctcgccagcgctggacgctgtctctgccttcaagggtccctacgcgccctgggagctgctttctgtgggggccccagggaactgtgggtcacagggagactaccaggccgccccggaggctcgttttcccgtaatagggaccaagattgaggacttgctgtccatcagctgccctgcggaactgccggccgtcccagccaacagactctatcccagcggggcctatgacgctttcccgctggccccgggtgacttaggggagggggctgagggcctccctgggctcctgacccctcctagtggggagggagggagtagcggcgacggcggagagtttctggccagtacgcagcctcagctttccccgctgggccttcgcagcgccgccgcggcggacttccctaaacctctggtggcggacatccctggaagcagtggcgtggctgcaccacccgtgccgccgccgccgcccacccctttcccccaggccaaggcgcgacgcaaggggcgccgcggcggcaaatgcagcacgcgctgcttctgcccgcggccgcacgccaaggccttcgcttgcccggtggagagttgtgtgcggagctttgcgcgctccgacgagctcaatcgccacctgcgcatccacacgggccacaaacccttccagtgccgcatctgcctccgcaacttcagccgcagcgaccacctcaccacgcacgtgcgcacccacaccggcgagaagccttttgcttgcgacgtgtgcggccgccgcttcgcgcgcagcgatgagaagaaacggcacagcaaggtgcacctcaagcagaaggcgcgcgccgaggagcggctcaagggcctcggcttttactcgctgggcctctccttcgcttctctctgagcaagagatgggtttatgggttggggcgccgccgttcggcgcgcacgagttccgggccgttcccctccccgctcttcttccaactcctcctcgcacgcccgagggccggcctccgtcccgcttccagtttccttgaagcgcccgccgcacacgccctattcagcaccagctcgccggacagttcccgcggtccaggcgctgtcacccttgtcagccgcgctttgggggaagtcttctgagaccacccagtgaataggcactaccctgggattcaagacagtcttttgtaactgcacacgccccacgccttcctctataacccccagagacaggctggggcaggccaaggcggtctcgcgcgggactttgtacagcagtgtcttatccagcagccgattggatgtaacgttttgctttgggttttttttccttttgttgttgttaatttttgtaaagcagacgctactctcaagcagttgacaaaactgtttatttttgcaattaaaattattgtgctaaaaaaaaaaaaaaaaaaaaaaaaa

SEQ ID NO: 155 - DNA, 2186 bp, Homo sapiens
acacggaccaaggagtctaacacgtgcgcgagtcgggggctcgcacgaaagccgccgtggcgcaatgaaggtgaaggccggcgcgctcgccggccgaggtgggatcccgaggcctctccagtccgccgagggcgcaccaccggcccgtctcgcccgccgcgccggggaggtggagcacgagcgcacgtgttaggacccgaaagatggtgaactatgcctgggcagggcgaagccagaggaaactctggtggaggtccgtagcggtcctgacgtgcaaatcggtcgtccgacctgggtataggggcgggctccaggcgaggcggtcgacgctcctgaaaacttgcgcgcgcgctcgcgccactgcgcccggagcgatgaagatggtcgcgccctggacgcggttctactccaacagctgctgcttgtgctgccatgtccgcaccggcaccatcctgctcggcgtctggtatctgatcatcaatgctgtggtactgttgattttattgagtgccctggctgatccggatcagtataacttttcaagttctgaactgggaggtgactttgagttcatggatgatgccaacatgtgcattgccattgcgatttctcttctcatgatcctgatatgtgctatggctacttacggagcgtacaagcaacgcgcagcctggatcatcccattcttctgttaccagatctttgactttgccctgaacatgttggttgcaatcactgtgcttatttatccaaactccattcaggaatacatacggcaactgcctcctaattttccctacagagatgatgtcatgtcagtgaatcctacctgtttggtccttattattcttctgtttattagcattatcttgacttttaagggttacttgattagctgtgtttggaactgctaccgatacatcaatggtaggaactcctctgatgtcctggtttatgttaccagcaatgacactacggtgctgctacccccgtatgatgatgccactgtgaatggtgctgccaaggagccaccgccaccttacgtgtctgcctaagccttcaagtgggcggagctgagggcagcagcttgactttgcagacatctgagcaatagttctgttatttcacttttgccatgagcctctctgagcttgtttgttgctgaaatgctactttttaaaatttagatgttagattgaaaactgtagttttcaacatatgctttgctagaacactgtgatagattaactgtagaattcttcctgtacgattggggatataatgggcttcactaaccttccctaggcattgaaacttcccccaaatctgatggacctagaagtctgcttttgtacctgctgggccccaaagttgggcatttttctctctgttccctctcttttgaaaatgtaaaataaaaccaaaaatagacaactttttcttcagccattccagcatagagaacaaaaccttatggaaacaggaatgtcaattgtgtaatcattgttctaattaggtaaatagaagtccttatgtatgtgttacaagaatttcccccacaacatcctttatgactgaagttcaatgacagtttgtgtttgggtggtaaaggattttctccatggcctgaattaagaccattagaaagcaccaggccgtgggagcagtgaccatctgctgactgttcttgtggatcttgtgtccagggacatggggtgacatgcctcgtatgtgttagagggtggaatggatgtgtttggcgctgcatgggatctggtgcccctcttctcctggattcacatccccacccagggcccgcttttactaagtgttctgccctagattggttcaaggaggtcatccaactgactttatcaagtggaattgggatatatttgatatacttctgcctaacaacatggaaaagggttttcttttccctgcaagctacatcctactgctttgaacttccaagtatgtctagtcaccttttaaaatgtaaacattttcagaaaaatgaggattgccttccttgtatgcgctttttaccttgactacctgaattgcaagggatttttatatattcatatgttacaaagtcagcaactctcctgttggttcattattgaatgtgctgtaaattaagttgtttgcaattaaaacaaggtttgcccacaaaaaaaaaa

SEQ ID NO: 156 - DNA, 8992 bp, Homo sapiens; identical to SEQ ID NO: 10

SEQ ID NO: 157 - DNA, 667 bp, Homo sapiens; identical to SEQ ID NO: 11

SEQ ID NO: 158 - DNA, 5316 bp, Homo sapiens; identical to SEQ ID NO: 12

SEQ ID NO: 159 - DNA, 972 bp, Homo sapiens; identical to SEQ ID NO: 13
  modified_base (603)..(603): a, c, g, t, unknown, or other

SEQ ID NO: 160 - DNA, 2716 bp, Homo sapiens; identical to SEQ ID NO: 14

SEQ ID NO: 161 - DNA, 3508 bp, Homo sapiens; identical to SEQ ID NO: 15
  modified_base (2673)..(2673): a, c, g, t, unknown, or other
  modified_base (2688)..(2688): a, c, g, t, unknown, or other
  modified_base (2695)..(2695): a, c, g, t, unknown, or other
  modified_base (2705)..(2705): a, c, g, t, unknown, or other
  modified_base (2708)..(2708): a, c, g, t, unknown, or other
  modified_base (2716)..(2716): a, c, g, t, unknown, or other
  modified_base (2724)..(2725): a, c, g, t, unknown, or other
  modified_base (2728)..(2728): a, c, g, t, unknown, or other
  modified_base (2757)..(2757): a, c, g, t, unknown, or other
  modified_base (2759)..(2759): a, c, g, t, unknown, or other
  modified_base (2763)..(2763): a, c, g, t, unknown, or other
  modified_base (2772)..(2772): a, c, g, t, unknown, or other
  modified_base (2784)..(2784): a, c, g, t, unknown, or other
  modified_base (2788)..(2788): a, c, g, t, unknown, or other
  modified_base (2794)..(2794): a, c, g, t, unknown, or other
  modified_base (2801)..(2801): a, c, g, t, unknown, or other
  modified_base (2805)..(2805): a, c, g, t, unknown, or other
  modified_base (2818)..(2818): a, c, g, t, unknown, or other
  modified_base (2828)..(2828): a, c, g, t, unknown, or other
  modified_base (2840)..(2840): a, c, g, t, unknown, or other
  modified_base (2861)..(2861): a, c, g, t, unknown, or other
  modified_base (2864)..(2865): a, c, g, t, unknown, or other
  modified_base (2934)..(2934): a, c, g, t, unknown, or other

SEQ ID NO: 162 - DNA, 1449 bp, Homo sapiens; identical to SEQ ID NO: 16

SEQ ID NO: 163 - DNA, 5605 bp, Homo sapiens; identical to SEQ ID NO: 17
  modified_base (2235)..(2235): a, c, g, t, unknown, or other
  modified_base (2659)..(2659): a, c, g, t, unknown, or other
  modified_base (2667)..(2667): a, c, g, t, unknown, or other
  modified_base (3334)..(3334): a, c, g, t, unknown, or other
  modified_base (5256)..(5256): a, c, g, t, unknown, or other

SEQ ID NO: 164 - DNA, 1781 bp, Homo sapiens; identical to SEQ ID NO: 18

SEQ ID NO: 165 - DNA, 1890 bp, Homo sapiens; identical to SEQ ID NO: 19

SEQ ID NO: 166 - DNA, 1056 bp, Homo sapiens; identical to SEQ ID NO: 20

SEQ ID NO: 167 - DNA, 623 bp, Homo sapiens; identical to SEQ ID NO: 21

SEQ ID NO: 168 - DNA, 3727 bp, Homo sapiens; identical to SEQ ID NO: 22

SEQ ID NO: 169 - DNA, 2087 bp, Homo sapiens; identical to SEQ ID NO: 23

SEQ ID NO: 170 - DNA, 665 bp, Homo sapiens; identical to SEQ ID NO: 24

SEQ ID NO: 171 - DNA, 1987 bp, Homo sapiens; identical to SEQ ID NO: 25

SEQ ID NO: 172 - DNA, 1374 bp, Homo sapiens; identical to SEQ ID NO: 26

SEQ ID NO: 173 - DNA, 2513 bp, Homo sapiens; identical to SEQ ID NO: 27

SEQ ID NO: 174 - DNA, 1737 bp, Homo sapiens; identical to SEQ ID NO: 28

SEQ ID NO: 175 - DNA, 629 bp, Homo sapiens; identical to SEQ ID NO: 29

SEQ ID NO: 176 - DNA, 3113 bp, Homo sapiens; identical to SEQ ID NO: 30

SEQ ID NO: 177 - DNA, 5190 bp, Homo sapiens; identical to SEQ ID NO: 31

SEQ ID NO: 178 - DNA, 2657 bp, Homo sapiens; identical to SEQ ID NO: 32

SEQ ID NO: 179 - DNA, 9295 bp, Homo sapiens
  modified_base (176)..(179): a, c, g, t, unknown, or other
  modified_base (181)..(187): a, c, g, t, unknown, or other
  modified_base (216)..(216): a, c, g, t, unknown, or other
  modified_base (942)..(942): a, c, g, t, unknown, or other
  modified_base (947)..(948): a, c, g, t, unknown, or other
  modified_base (1604)..(1604): a, c, g, t, unknown, or other
  modified_base (2275)..(2275): a, c, g, t, unknown, or other
  modified_base (2574)..(2574): a, c, g, t, unknown, or other
  modified_base (3132)..(3132): a, c, g, t, unknown, or other
  modified_base (4279)..(4280): a, c, g, t, unknown, or other
  modified_base (5306)..(5306): a, c, g, t, unknown, or other
  modified_base (5984)..(5984): a, c, g, t, unknown, or other
  modified_base (6071)..(6071): a, c, g, t, unknown, or other
  modified_base (7021)..(7022): a, c, g, t, unknown, or other
  modified_base (7025)..(7026): a, c, g, t, unknown, or other
  modified_base (7028)..(7029): a, c, g, t, unknown, or other
  modified_base (7747)..(7747): a, c, g, t, unknown, or other
  modified_base (8449)..(8449): a, c, g, t, unknown, or other
  modified_base (8453)..(8453): a, c, g, t, unknown, or other
  modified_base (8518)..(8518): a, c, g, t, unknown, or other
  modified_base (8544)..(8544): a, c, g, t, unknown, or other
  modified_base (8602)..(8602): a, c, g, t, unknown, or other
  modified_base (8611)..(8611): a, c, g, t, unknown, or other
taaccgatcgatcccgaagaccaccttgcgagggccccccccgcccggttctggatgatgtccttgacgatgcccttgatgtacctgccgctcacgaaatccacggcgcgcagcgccagccctttacggtgcttcacgtgcgccggaacacagacccggccccttcctctgtccannnntnnnnnnnttttttttttttttttttttttttttttntcattttagaatgttctttattctgacagttgttggacaaatataaggcatgttcacaagtatctgaagttatgtacaaaacacactcattcaacggatgttcctcttctccttttgtacttgctgctgcaaactgatcctcatgcacgttaacacccatagcgctcaattcttatggatatgcagacagtgttttggggaccaccgtggagaatctgtttcaaactaaggcgtgagcttctaagaactaagtcactaagacatcagaactcacagtgaacaaaggcagaggaaggtgaccaaatcagctcataaactcatgactctaagtttccagtggaacaaagaacacattgaaaaacattttttgatccttcatgttggagagaaatggaatgtgaccagaattcatggttctatatttaccactgtctaaaagtcacaaaacaatatctaattttttcatggtttctaatgcagttacagttttgttcttaggtcacagtacaagactgcatgcatactttacacaaatatcaaacacagaacgattgtaacacagatacctcagggttgtctaaagacacagcttctctttttgtggtggggtggggaaggagaatggtggtggccatttccacacacagcctgttgtgtgctcagcacggctggatgcggatcccaagcactcgctgactgactcacagaagaggacagaagctgctnagganngcagcggagttcaaagagcaggctccaaccgggggctgggatgacggacacacagcctcgattccagggggaaaaagtcttagtcgatactaattaaaaagtgttaatgatttttgaaaatcagattacatctataaaagatgaaaagcaaacacttaaaacaatctaacgggggaacataaaataataaaaaatcaaatgcagatgggatttcacaaagaggagatttgaatcttttggtctaaatcagccaatattttaacattaactataaattattaaaatatagtttgcttatgcccatccttaaaatgcagaatctttgaggaaaaatataggcatatcaggaatacagactcttgtaaaaaatttaaaaagtcagtatcatctctcttgtggagctaccagaacaggtttttcaaacagaaaaggggaacaaacgtggggaacaaacgtggggcgcttggctatgttaagaattcttatcactagaatactgcttcgagacgttcatagtactttccaaaagaagccacccacctcaaagagccctgcgcagccccagtgacccatgagtgtggtagccgtcattttattagccactgttggcaatcatcaaagtattcactcagagtggggaaattacttaatatcancgatattaacgatttccatgtatttagctttgtgacacacaatgcacaagggtcttcaaatgtttgttttttacaccagtggtagaaaattgtcattcttcggattcaacacactggtggatgacactttagtgaagtgtgactacctagaagagcaggaaggcagctcctgattctgactgggccagcctcttccagaaggtgactcttctgtcaggagatcacgaccctggcaggccgggcaagcgctctgccctttaagccactgcttaaagcaccctttgtgatacttgtgcccacatttgagcacacgcacgttttttgatttgaacacctcgtggcatatttcacaggaacttgcacccagtgcaatcctcacagggacatcttctgctttctgccccttggttttgggtgatggtgcaacaaccaccgagggtgagccctgggaggacctggtcacgggggtggcagagctgggctcataagtcctcttgtcctttcctgggtttggctttttctttttctgttcatctagaatgtgttctgtcactctttggacaatttcatcaatactcaatcctgagagtgagttcttgtttttgcttcgcacttttttaataaaaccagcaagctcagtgctgttgtaacatgggaataccactgacagntgctcaataatactattgaacggcttttttggagactggcttgaacgcgcagcacgtcctggaggaacaggctgcttccgatcagccacagggcttcgttctgacagagctgcctggccagcccgttttggccctgtcagctgagtggcttcaggctgaccagggggtggccctggcaacagcgcagaaggagcctcccctggggaatcaccagcagagaacacactaggatccctgtgaagtgctgcgtggtttccagtcacgtcgcttgcagaagtcacaagcccttggccatcgtngcctgaagactcagggagtaactcgggatgaaccgtgttacaggcaggaaatgaaagctcagaaatctgcactttagaaagttcactgagccgagaaccatttttaattgccttaatttgttcttcaaactgagactttgctttctcaatttcttttgtaacattagaaagaaacaattcccatgaacgtatatcagactccatgtcaggatatgctgcaggatcacggctaatcagccccagcttcttcagaaaggcttctgcttgtgactccatgatctgtagcttatacacttcactctccttccagttttcaagtacggatacctctgcagccacagctctctgatgactctcttcataatcctctttccctttctttatatactcttctattttcattttctcatttgtaagtgtgttgctgatttcaagggactgatccagatgtaattcatgttccttttcctttccatcatttttctgggtatacatttcactggcatttgaaacctttttaattttcttcttcagtgattttagtctttcttggatttnttttttttcctgttgccattttttaatttctctttccaaatcttgaaggaaccaatctaattccgtctttgagatcttgttttcttctaagtgccttttcaacttctcttccaggtccctggtctcttctaagcccttaagttttatctgctcataattttcatacacttcttgaagttggtcttgtaatacttggtgctccttttcaatccgtgaaatttccccttgtcgttcctcaaaaggattatatggctcagtattgacttcttggtgtattatgttccaagatacctgtatggcaaccatctgcacgtgtggaatgtttgttactgcactggtgctttctggaattacttcacatttgttgttagaatttccacagtgctcatcatttctgttagactcactcaggactgtatgagcatcacctgtgctgcagtgtgactttacagatattcccaaagagccctcaaggatctgtgtttcagaggcaatctggtgaccagcaacattctcagcattcaaatgatgaccctcaaaataggcagcagcatttttatctgctctgtcattggctacaaaagacggcaccactggtactgatcttggtagctgatattcaggagaaaggctggccaagggtgtatatatgctggtgtactggggcaaacctggtaacacgtttatgtatgctggcggtgtctgggtgatatcaaatctctggaaaggaagatacgtacagtatcctgtgaccaaatgggattgagcccaataagttggtttcacatcctcaagaaccggtttgggggaattacaggagactcgcttgtaatttgcatcctcagagcctggtttaggagaattagaagagacccctttgggttgcccatcctcagaaacttgtctagaagaattgtcggatactggtttggccttcacatcttcacaagctggcttgggagaatttgcagacacaggtttgggtttcacattttcaaaagctggtgctgaagatgaatctgacactggtttagactttacatctggtttaaattccctagcagctggattcagttgtagtttaactcgtacatactcccctgcttttgaaatttcttctacttttgttttaatgtttttcttcttnntttttttcttgagccgtgatgcaaccttcttcagtgcaatacagttgtcaatcacaacaaaacgagggcatcccaagagaaaaggttttaaacctcctgctttttctagtatctgtcgagtttcttctgggaaaaactcatattctgcagagaacatcttgttactcatgtccaagggaccatgttcctccaaaaactgagagaagtaatcatatagagttgaacatttttgttttgggttcatgtcccatagcttcttattgcggacaacatattcgttactgtgttggtcatagagagcttcgaattcttctacatcttgccgaagatggtcaggcactgcaaatgggcctgcagaatctgaatttcgattgctatggtcttcacttgaagtgatgatctcattatttgaagttactgaagttgttccagacccaactaacataggctttgaatcctttggcttctttttcttgcttttgtttttcaccttggttgaactaaacggtgcttcaccactatcttgtttccttaacacagtacagcggctgtccattatatcaaagaattcatctaaagcactatgcaatgctgggaacttgtctctgtgttcttctagcagccatattaaacaacgggcttccttcaatgatgctggctcagagaaataatcaagttgctttccttctatagagtctagtttgtgaccatatttctcattccagaggaaagtcatgatactaaaatcaagcagtttaagagatgctccataacgagaaaagaaagttcctgtggcatctaagccaaagctattaagtttttggatccaggcggctaatttgggctccacttctttaagctcactcaaaacatgcagaaatattcttgtctttactctgttattttcttgaatcaagtggcgaataacatagtccactgcttcatttagaaaatttctgctagaaaaacaggttgtatagtcttctgtgctcaaaactttccaagaaagcaattctttgagaagcntggctgtattctgtatgccggatttaatcttgtcagcatactgctttatacactgtagaattctgtcatcaaggaactgacaacgctgaacattgtctacagtttctttctgctcttcatttttgggtggattactttctcttaagtcctcctccattctttcttgtgctaacttttttgcttcttttttttggatctttctcttcaattttttgtcttctttcagtcttagtttctctaggctagaacatttctgtttcagaataggtcttggaggaaccttttcttttatgaccttgtgttcaaattcacatttaacttcaccaccactgctgaagatgataatcttagaaatgacaccttcacagtcaggggtaagacatattccttgtagaaaatccttgtcaattttatcattaaaggttgtagtttttaacttcttccagcaattcatgtgaaattctattttacagtactggcaacagctgatgcgtataaaacccttaaagtctggatcagttatgtatatctggatcttagaatatccatggcacttctgatagcaacaaatggcatctggcactggagggaacttgcattcttcaacaaatttctctaacagcatctttattttttgtggctgagactcttcaataatcacattactcgtgggccaangttaacactccaggaagacgataaatcaaggttcttgctttctcaaagtgattgagagcttctagaaatctgttttttttcaaatanacttttccaattccacagtaggccaagcaatcaaggccctcactggggtagtgttcaataatcctcttaaactggttttcggcttcagataattcctcaggctgtcctattccaaggagagaaatggcaagtccatagacgaccaaaacatagttaatcatggccaggttcaattgctttattttttgaggatctaaaccgttcagcaactctgtaaaggcctgtgcagcgctgcggcaacgctgctccaataaggccatatagccatcttgaattaagcttctcagcattttcattatattagcaaaatcctggtgtgcagctctggaagatttagaaaactgtttctccaagatgttcttcaaatctgctggtaaagtcaatggtgaactagaactgaacttttctgattcattgtttcgagatttttgttttcctttatgttttggaggctgacttgatggtggtgaaaattcaggatgacagtcacaatcatctaccttcaacgcctcatccgccacctttagattctgattaccaccgttggccatttcgtgattaatttttctgaaatctctttccttctccacaaagttaagtgaagtagtaaatataggtgctgataaactcctaggtgtgtaggccctgttttcataaaaggctttaattggatccttatttgctgttcgaccttgtaggtcttctatttgtttttgtaactttacatgctgctgaattagatccttgattccctcagggtcatttttacagagtttttgagcttttatgtttgcttgcagggcccagtcatattcccccagcatagaaagagcatcacaataacgataatgaccctttggccaagtgttcttcagaatagtggctctctttccatcaccgagtgcatttctaaactgtccagtacgaagaaaacaaagagctcggttacnntanngnnggtagttttcaggtctatattcaatggctctggtgtaatagataatagctatatcaaatctttctttggaaaactcttcatttcctttcattttcattagttctccttcctctatacaatccatacaactttgagttttaagttcttcaagcaaattgcagtcttccattacaattttagttatgtggtacttgtattcagtaaagaaaatacttaacataggccaacaattgtcaattgatcctaatttagttagaattgttacatcgcctgcatattttatccaattcagagcttcttccattgccaagattttattttctattttacaaccaattctcaataagcctccaataaggaatgaatcattagcaactttctttgccaaatccacaatatcttccatcaactcaagatgttgtagtttcttcaaatttatctcagaagcacgtgaattgttggcgtccacacagggatgcaatcgtgatattacggaactgttttgatgttgaaacagaagtggccagaagatgtttattttaatggcatcgcaataatcttgcaggacagaaattggtttactacaccatatactgcagatgtcaaattccaaattcctctcactttggatataatctttatattgcacacccaccccatcacagtaaagctgagtcacacgaacataatcattgctcataaattcagcagcaaaganacaatcatccacgtgagggcaatcttctaacaaggcataatccgccacagtgaaatctccctcagcaaaattgtccatggtgcacaagtctaaggagacaacacaaactcaagtcagtaattaaatcatttgagataacagaagaaagttttcctggcttctatggtatattagaaaaatacttggaacctatgcccaaggaaataactcctatcagaacactgagctccgaaagattctcgtccccattctgctgacttttcctctctctccagataatttaatctatttcttcctttcctcaggttcacatattcaccatctctactctaagttaacctgtttacatgtctcctttaaatagaggatcatcaagggcatcttatttatctttgtatgtgcctagcacatggtaagctctcaaataagtgtttgctgaatgaagaaaagacatcttcctgttgctgcacttgtaccctacctgcttttactgcattctgtgaaatatgccatttcatcatacacaaactgttatattctcaatctcctggcctaacctaaatcctgactccactgagaactttcctatcaactgctcatattctcctatccatctcagtgtgtttctgtcttgggcaaaggagtagggctagagtggtacagggtaagtctgccaatctcctaactccccaaggcggcatncagnccttccatcctcctatcgactgctgcttctaatgctctcacaactactgcaatacacaatcagcnctgctaaatcgcaaaaaggaaaaaanccctcacattatcaaaagccatgttttaaaaatacgtatttcaatggggggcaagggngattggtgntaaagtttcagactaagggtttttttttcctgaagaatcttcaataataaggatttttatagttatcagagaatagctacataggccaaacatcactgaaaaatgcaccattttattacttctagctcttgcccatataatggctttcttttcctatcatcaccagcgcatcataaacactattacttgtacctatcacttcaccattattatcctactattattaggataaaccaagtttcttctttccaaagcaagaacactaccagtccttgaagttcaaatctatttatttaatcaatccatctcatgatgtccaatttgctgtatgaaaacttcacaatatcacaagtgaagaataataacaatcttcctagcaaactatttgtactatgtgtcacatactgtaccaaatgttttacatgcattatttcactaatcttcacagcaattcttcttagcaggcacaattatcgttatctccactgtacagatgggaaaatgctcacttaaatcaagtaatttgctcatgtcaccaagctaggaaggattcaaatccagtctttagttgccatagcttctgctctcaaacactctcttttactacatctaattttcctgtcattgtcacctatttatctcttggttactgtcacgtttcaagatcactggcaactagttcag

SEQ ID NO: 180 - DNA, 2206 bp, Homo sapiens
  modified_base (1)..(1): a, c, g, t, unknown, or other
  modified_base (16)..(16): a, c, g, t, unknown, or other
  modified_base (1240)..(1240): a, c, g, t, unknown, or other
  modified_base (1826)..(1826): a, c, g, t, unknown, or other
  modified_base (1876)..(1876): a, c, g, t, unknown, or other
  modified_base (1879)..(1879): a, c, g, t, unknown, or other
  modified_base (1903)..(1903): a, c, g, t, unknown, or other
  modified_base (2178)..(2182): a, c, g, t, unknown, or other
nagagtcggattcgcngccgcagcagccgccgcccccgggagccgccgggaccctcgcgtcgtcgccgccgccgccgcccagatccccgcaccatgccgtcggagaagaccttcaagcagcgccgcaccttcgaacaaagagtagaagatgtccgacttattcgagagcagcatccaaccaaaatcccggtgataatagaacgatacaagggtgagaagcagcttcctgttctggataaaacaaagttccttgtacctgaccatgtcaacatgagtgagctcatcaagataattagaaggcgcttacagctcaatgctaatcaggccttcttcctgttggtgaacggacacagcatggtcagcgtctccacaccaatctcagaggtgtatgagagtgagaaagatgaagatggattcctgtacatggtctatgcctcccaggagacgttcgggatgaaattgtcagtgtaaaaccagaaaaaatgcatctcttctagaattgtttaaacccttaccaaggaaaaaaaaggggtgttaccaactgagatcgatcagttcatccaatcacagatcatgaaacagtagtgttcccacctaggagtgttaggaagttgtgtttgtgtttcaagcagaaaaactgagctccaagtgagcacattcagctttggaaactatattatttaatgtaggctagcttgttttcaaattttaaaagtttaaaaataaaatactttgcattctaagttgccaataaaatagaccttcaagttattttaatgctcttttctcactaataggaacttgtaattccagcagtaatttaaaggctttcagagagaccctgagtcttctcttcaggttcacagaacccgccgcctttttgggtagaagttttctactcagctagagagatctccctaagaggatctttaggcctgagttgtgaagcgcaacccccgcaaaacgcatttgccatcacagttggcacaaacgcagggtaaacgggctgtgtgagaaaacggccctggactgtaaactgctgaaggtccctgactcctaagagaaccacacccaaagtcctcactcttgcaggggtagacatttctggtttgggtttgttctctagatagttacacacataaagacaccactcaaaaggaaacttgaataatttataattttgatcgagtttcttaaaagaccctggagaaagagtggcatttcttctgtttcaggtttngtctgagttcaaactagtgcctgtgttgttacggaaagcagcagtgtaccagtgtcactctggagtacagcgggagaaacacaaaatagtataactgaaaacattaacattccagacacactcccttctgccttccggcttaaagctgtggatgatccacgtttttgtttttttaatgttaaatgtgtaactcagtattactgaaaaggtacccacattttgaatagtagttatcactcttaggtcagacagccatcagaattctcccacaccaagtgcatgtcagttgtggagaaaacatagcaaaaagagccgtacgctctttacagatactaatgtcaagagttaaacctcctcaggttcaacctgtgataaaagactagtgcttcccagtacttgcatggggttcactatttatagttttcttgggagtatcacaggaaaatcacaattacaccactttagaccctatgtgtagcaggtcacaacttacccttgtgtgtttagatgtgtatgaaatacctgtatacgttagtgaaagctgtttactgttaacgggggaaaaccagattctttgcatctgggngccctctactgattgttaaaggagttcctgttcacctgctccccccaccnccncgcatgcgtcctgtccacttggcntaacttttaatatgtgtattttttacattatgtatattcttaactggactgtctcgtttagactgtatacatcatatctgacattattgtaactaccgtgtgatcagtaagattcctgtaagaaatactgctttttaagaaaaaaaataacatgctgaggggtgacctatatcccatgtgagtggtcactttatttataggatctttaaaacatttttaatgaactaagttgaataaaggcacaattaaaaactgtcaaaaaaaaaaaaaaaaannnnnaaaaaaaaaaaaaaaaaaaaaaaa

SEQ ID NO: 181 - DNA, 4430 bp, Homo sapiens
  modified_base (28)..(31): a, c, g, t, unknown, or other
  modified_base (1327)..(1327): a, c, g, t, unknown, or other
  modified_base (2233)..(2233): a, c, g, t, unknown, or other
  modified_base (3002)..(3002): a, c, g, t, unknown, or other
  modified_base (3069)..(3069): a, c, g, t, unknown, or other
  modified_base (3561)..(3566): a, c, g, t, unknown, or other
  modified_base (3570)..(3570): a, c, g, t, unknown, or other
  modified_base (3572)..(3572): a, c, g, t, unknown, or other
  modified_base (3623)..(3623): a, c, g, t, unknown, or other
  modified_base (3836)..(3836): a, c, g, t, unknown, or other
  modified_base (3862)..(3862): a, c, g, t, unknown, or other
  modified_base (3866)..(3867): a, c, g, t, unknown, or other
  modified_base (3872)..(3872): a, c, g, t, unknown, or other
  modified_base (4038)..(4038): a, c, g, t, unknown, or other
atccttaattaaattaatcccccccccnnnnggtcttgttcggctcctgtgtgtaggatccagaatcaatagtgaattcgtgggatttcggcctgagagcgggccgaggagattggcgacggtgtcgcccgtgttttcgttggcgggtgcctgggctggtgggaacagccgcccgaaggaagcaccatgatttcggccgcgcagttgttggatgagttaatgggccgggaccgaaacctagccccggacgagaagcgcagcaacgtgcggtgggaccacgagagcgtttgtaaatattatctctgtggtttttgtcctgcggaattgttcacaaatacacgttctgatcttggtccgtgtgaaaaaattcatgatgaaaatctacgaaaacagtatgagaagagctctcgtttcatgaaagttggctatgagagagattttttgcgatacttacagagcttacttgcagaagtagaacgtaggatcagacgaggccatgctcgtttggcattatctcaaaaccagcagtcttctggggccgctggcccaacaggcaaaaatgaagaaaaaattcaggttctaacagacaaaattgatgtacttctgcaacagattgaagaattagggtctgaaggaaaagtagaagaagcccaggggatgatgaaattagttgagcaattaaaagaagagagagaactgctaaggtccacaacgtcgacaattgaaagctttgctgcacaagaaaaacaaatggaagtttgtgaagtatgtggagcctttttaatagtaggagatgcccagtcccgggtagatgaccatttgatgggaaaacaacacatgggctatgccaaaattaaagctactgtagaagaattaaaagaaaagttaaggaaaagaaccgaagaacctgatcgtgatgagcgtctaaaaaaggagaagcaagaaagagaagaaagagaaaaagaacgggagagagaaagggaagaaagagaaaggaaaagacgaagggaagaggaagaaagagaaaaagaaagggctcgtgacagagaaagaagaaagagaagtcgttcacgaagtagacactcaagccgaacatcagacagaagatgcagcaggtctcgggaccacaaaaggtcacgaagtagagaaagaaggcggagcagaagtagagatcgacgaagaagcagaagccatgatcgatcagaaagaaaacacagatctcgaagtcgggatcgaagaagatcaaaaagccgggatcgaaagtcatataagcacaggagcaaaagtcgggacagagaacaagatagaaaatccaaggagaaagaanaagaggggatctgatgataaaaaaagtagtgtgaagtccggtagtcgagaaaagcagagtgaagacacaaacactgaatcgaaggaaagtgatactaagaatgaggtcaatgggaccagtgaagacattaaatctgaaggtgacactcagtccaattaaaactgatctgataagacctcagatcagacagaggtaagtgtattgtttctcactttgattagggctttttgttactgtttgacagtgcagcgtaagtatgcacagatgaagatggaactaagccgagtaagaagacatacaaaagcctcttctgaaggaaaagacagtgtagtcctgcaaaacattttgaggtacattgttttgtctcagctattttgtagcagactcgtgcccccattagtgtgcctctttggaaattatcgcccacatttgtaatatagtcgccattgaaaagttaattatcctttttttagggattttgatgtcatttcttttttttttttaataaaaaggttgaactgtttttttttttctttttggtattaagtccatcttgtgttggtacattggcagagacatatgctttaaaaacttaaatatttcggaggcacatgttggactactttgttttaattaaactgctagtatttctttgtcaaggatgtttctagttttttgctttattgccttgcattctaatgcagtttgttctgtaactcgagagccagtagcattggattgatggaagtgtagggtttatgaattattgcagctgactaccatacctcacacagcgttggtgttgtgagcggcccatgaaaagccaaattaaaaatcaaggattcagtcaaactaagcaggtactcatgccaggtactcctttctctacccacatccatgtttgantgctattgcctgtgatctttacgcttaactgttgtgtatcttttttgttctttacaagaagtgcagaggggttttttgtgtattgcgtgaaaacttataaaacaaatgttaacagaatggaattttttttcaactgtatgtagggctgcagtggtggccagaattagatatctttaaagaattttaaatacaataaacacttcatattattcgccttgttacactcaatgcaattctcaagtctataagaggtatgtgcttaatatttcctactgtgtaggagaatttgcagtcagccataggtatgtaggaatagtcactcactggctgatacatttaaagcagcagtgtgaatagcaaggacagacaccttcaatttgtgaaatcaaagaactgatgcactatatagaacgaatttgggtttttaaagaaatattaaaagttaggtactgtaagtgttcttaaaacctgtaaacttcattctgtgggctagtggtgtgggacaaaatattcctaatgaaaggaagtaccaattagttgatttgttggtggcattccccttttgggaaagcaatgtaaggttatgtctgtgtatgtcattcacacttaggcaagcatacacaggcacatggctttaagaaccacactgatgccttgataattaaaaagaatacaagcattccatgtacacatgttaattagcagttagtgactgggccaacactttctcataaaaattggccttttacatgttgtctaattatcattnttccccaaattttgcgttgtaggactactgttcgaagatttttggaagaatactgagaacggcatanagtgaagatcgacatttaaaaaatgaggtgaaagaaagctatagtggcatagaaaaagtataaagctcagttagtttttttattattattattattaaaagttaattcaggactgatgtgacctaccagatttcagaacatgtgttaatagtatatatgccactgaaaacttaggtcctgtatcatacttttttctttaagactttttaagaaatattacttaaacatgtggcttgctcagtgtttaattgcaagttttcaatcttggactttgaaaacaggattaaacgttagtattcgtgtgaatcagactaagtgggatttcatttttacaactctgctctacttagcctttggatttagaagtaaaaataaagtatctctgactttctgttacaaaaaaaaaaaaaaagctgttgattgtctctgtcattgaaaagttttagtattaatctttttctaataaagttattgactctgaaaaaaaaaaannnnnnaaananaagagttacactattactagaggtgttggtgtacagttttatctgatttgntctgtttaagactaatttttatagactttctaatgttttaaataatggtgcttcaattttaggtggttatgaataaatttgaattttgcttttaatagcaaagatgtgcagtgaactagaatatatttttacatccctgagagattcatttagtagaaaattccaagtatcctgacaagcactctttagctggctagctatgggatgatgtanaaaagcattcaagagctagtttttgntaanncctgnatcaagattaacccagctgtgtcagtttataaatgtatttgtgtatagggtgtgtagtatatatggcaagggttttttccccccacttaagtgattatttttgtgtcacatctaggaaaaccggcagcatgtttctatctatagccagcttcttcgactgtataanagtattctctccagctacgtatatacacacatacatatatatcatagcaattccttgtggtttataacttgcaaatactgctatcagtttataggtaaagaaacagtgtgttaaatgacttatccagggagggtcctgtggcttcatgtttatggagttgctaggtctctgcctcatggtccagtgcctgttaagccactgtgttcattctaataggcataatgaattgttaaagaatttactaaaatctcttccaccaaactttgaaaaataatgaagccgcccccactttagaggctctgtatgaaaaaatgctgtggagacagagccctcctggctccctagctgatcctggagatgcagcaatagatgaatgggttatctctgaattt

SEQ ID NO: 182 - DNA, 4330 bp, Homo sapiens
  modified_base (2)..(7): a, c, g, t, unknown, or other
  modified_base (9)..(9): a, c, g, t, unknown, or other
  modified_base (20)..(20): a, c, g, t, unknown, or other
  modified_base (2452)..(2452): a, c, g, t, unknown, or other
  modified_base (2456)..(2456): a, c, g, t, unknown, or other
  modified_base (3312)..(3312): a, c, g, t, unknown, or other
  modified_base (3550)..(3550): a, c, g, t, unknown, or other
  modified_base (3562)..(3562): a, c, g, t, unknown, or other
  modified_base (3572)..(3572): a, c, g, t, unknown, or other
  modified_base (3598)..(3598): a, c, g, t, unknown, or other
  modified_base (3621)..(3621): a, c, g, t, unknown, or other
  modified_base (3699)..(3699): a, c, g, t, unknown, or other
  modified_base (4140)..(4140): a, c, g, t, unknown, or other
  modified_base (4180)..(4180): a, c, g, t, unknown, or other
  modified_base (4199)..(4199): a, c, g, t, unknown, or other
  modified_base (4203)..(4205): a, c, g, t, unknown, or other
gnnnnnngnggcaggtgccngacatggcgagtgtagtgctgccgagcggatcccagtgtgcggcggcagcggcggcggcggcgcctcccgggctccggctccggcttctgctgttgctcttctccgccgcggcactgatccccacaggtgatgggcagaatctgtttacgaaagacgtgacagtgatcgagggagaggttgcgaccatcagttgccaagtcaataagagtgacgactctgtgattcagctactgaatcccaacaggcagaccatttatttcagggacttcaggcctttgaaggacagcaggtttcagttgctgaatttttctagcagtgaactcaaagtatcattgacaaacgtctcaatttctgatgaaggaagatacttttgccagctctataccgatcccccacaggaaagttacaccaccatcacagtcctggtcccaccacgtaatctgatgatcgatatccagaaagacactgcggtggaaggtgaggagattgaagtcaactgcactgctatggccagcaagccagccacgactatcaggtggttcaaagggaacacagagctaaaaggcaaatcggaggtggaagagtggtcagacatgtacactgtgaccagtcagctgatgctgaaggtgcacaaggaggacgatggggtcccagtgatctgccaggtggagcaccctgcggtcactggaaacctgcagacccagcggtatctagaagtacagtataagcctcaagtgcacattcagatgacttatcctctacaaggcttaacccgggaaggggacgcgcttgagttaacatgtgaagccatcgggaagccccagcctgtgatggtaacttgggtgagagtcgatgatgaaatgcctcaacacgccgtactgtctgggcccaacctgttcatcaataacctaaacaaaacagataatggtacataccgctgtgaagcttcaaacatagtggggaaagctcactcggattatatgctgtatgtatacgatccccccacaactatccctcctcccacaacaaccaccaccaccaccaccaccaccaccaccaccatccttaccatcatcacagattcccgagcaggtgaagaaggctcgatcagggcagtggatcatgccgtgatcggtggcgtcgtggcggtggtggtgttcgccatgctgtgcttgctcatcattctggggcgctattttgccagacataaaggtacatacttcactcatgaagccaaaggagccgatgacgcagcagacgcagacacagctataatcaatgcagaaggaggacagaacaactccgaagaaaagaaagagtacttcatctagatcagcctttttgtttcaatgaggtgtccaactggccctatttagatgataaagagacagtgatattggaacttgcgagaaattcgtgtgtttttttatgaatgggtggaaaggtgtgagactgggaaggcttgggatttgctgtgtaaaaaaaaaaaaaaatgttctttggaaagtacactctgctgtttgacacctcttttttcgtttgtttgtttgtttaatttttatttcttcctaccaagtcaaacttggatacttggatttagtttcagtagattgcagaaaattctgtgccttgttttttgtttgtttgttgcgttcctttcttttccccctttgtgcacatttatttcctccctctaccccaatttcggattttttccaaaatctcccattttggaatttgcctgctgggattccttagactcttttccttcccttttctgttctagttttttacttttgtttatttttatggtaactgctttctgttccaaattcagtttcataaaaggagaaccagcacagcttaggatttcatagttcagaatttagtgtatccataatgcattcttctctgttgtcgtaaagatttgggtgaacaaacaatgaaaactctttgctgctgcccatgtttcaaatacttagagcagtgaagactagaaaattagactgtgattcagaaaatgttctgtttgctgtggaactacattactgtacagggttatctgcaagtgaggtgtgtcacaatgagattgaatttcactgtctttaattctgtatctgtagacggctcagtatagataccctacgctgtccagaaaggtttggggcagaaaggactcctcctttttccatgccctaaacagacctgacaggtgaggtctgttccttttatataagtggacaaattttgagttgccacaggaggggaagtagggaggggggaaatacagttctgctctggttgtttctgttccaaatgattccatccacctttcccaatcggccttacttctcactaatttgtaggaaaaagcaagttcgtctgttgtgcgaatgactgaatgggacagagttgattttttttttttttntccnttgtgcttagttaggaaggcagtaggatgtggcctgcatgtactgtatattacagatatttgtcatgctgggatttccaactcgaatctgtgtgaaactttcattccttcagatttggcttgacaaaggcaggaggtacaaaagaagggctggtattgttctcacactggtctgctgtcgctctcagttctcgataggtcagagcagaggtggaaaaacagcatgtacggattttcagttacttaatcaaaactcaaatgtgagtgtttttatctttttacctttcatacactagccttggcctctttcctcagccttaagaaccatctgccaaaaattactgatcctcgcatgatggcagccatagtgcatagctactaaaatcagtgaccttgaacatatcttagatggggagcctcgggaaaaggtagaggagtcacgttaccatttacatgttttaaagaaagaagtgtggggattttcactgaaacgtctaggaaatctagaagtagtcctgaaggacagaaactaaactcttaccatatgtttggtaagactccagactccagctaacagtccctatggaaagatggcatcaaaaaagatagatctatatatatatataaatatatattctattacattttcagtgagtaattttggattttgcaaggtgcatttttactattgttacattatgtggaaaacttatgctgatttatttaagggggaaaaagtgtcaactctttgttatttgaaaacatgtttatttttcttgtctttattttaacctttgatagaaccattgcaatatgggggccttttgggaacggactggtatgtaaaagaaaatccnttatcgagcagcattttatttacccctcccctatccctaggcacttaaccaagacaaaaagccacaatgaacatccctttttcaatgaattttataatctgcagctctattccgagcccttagcacccattccgaccatagtataatcatatcaaagggtgagaatcatttagcatgttgttgaaaggttttttttcagttgttctttttagaaaaaaagaaaaacaaaaacaaaaanaaaaaaaaaaantcacaccatngctcacagaattggcatctcattttngggacctcccatctttctgtttngaaaagtgtacagtagtgcagtgttcctgatgtaactttatggcttacaatgttgacatgtctcaggttcatgtgttncgattggtgttttccgtctcaggtagattgcaaagtgtaggccccacacattggaaaaaataataataaaacaaagcaaaaacaggaaattatggattttagttgtatattggtttatgtattttttcttaagtatacagtgcactgtttgaaatgtattgttgagtattactttgtacaggttgatcactttttttagagtgaagaaagaacaaacttgttttttgtgttttttaaaggaatataaaataatgaaggatgtataattgatgccaaataagcttgttctttagtcacaccgacgtcttatttttccctttaggccagttctgtttttaaggtgtacatggacaatgttacagtgtaagaaactccatatccatatgttcccattcgcattttgtattggttcatgtataccatttttacaaaaaaaaaaangaaaaaaaagaagtactataaaatatctgtcttcttaatnaaaaaaaaattaatgttanaaannnaaaaaaaaaaaaaaaaaaaaaaaaaaaaaaaaaaaaaaaaaaaaaaaaaaaaaaaaaaaaaaaaaaaaaaaaaaaaaaaaaaaaaaaaaaaaaaaaaaaaaaaaaaaaaaaaaaaaaaaaaaaaa

SEQ ID NO: 183 - DNA, 3387 bp, Homo sapiens
agggccacaggtgctgccaagatgctccagggcacctgctccgtgctcctgctctggggaatcctgggggccatccaggcccagcagcaggaggtcatctcgccggacactaccgagagaaacaacaactgcccagagaagaccgactgccccatccacgtgtacttcgtgctggacacctcggagagcgtcaccatgcagtcccccacggacatcctgctcttccacatgaagcagttcgtgccgcagttcatcagccagctgcagaacgagttctacctggaccaggtggcgctgagctggcgctacggcggcctgcacttctctgaccaggtggaggtgttcagcccaccgggcagcgaccgggcctccttcatcaagaacctgcagggcatcagctccttccgccgcggcaccttcaccgactgcgcgctggccaacatgacggagcagatccggcaggaccgcagcaagggcaccgtccacttcgccgtggtcatcaccgacggccacgtcaccggcagcccctgcgggggcatcaagctgcaggccgagcgggcccgcgaggagggcatccggctcttcgccgtggcccccaaccagaacctgaaggagcagggcctgcgggacatcgccagcacgccgcacgagctctaccgcaacgactacgccaccatgctgcccgactccaccgagatcaaccaggacaccatcaaccgcatcatcaaggtcatgaaacacgaagcctacggagagtgctacaaggtgagctgcctggaaatccctgggccctctgggcccaagggctaccgtggacagaagggtgccaagggcaacatgggtgagccgggagagcctggccagaagggaagacagggagacccgggcatcgaaggccccattggattcccaggacccaagggcgttcctggcttcaaaggagagaagggtgaatttggagccgacggtcgcaagggggcccctggcctggctggcaagaacgggaccgatggacagaagggcaagctggggcgcatcggacctcctggctgcaagggagaccctggaaaccggggccccgacggttacccgggggaagcagggagtccaggggagcgaggagaccaaggcggcaagggggaccctggccgcccaggacgcagagggcccccgggagaaatcggggccaagggaagcaaggggtatcaaggcaacaatggagccccaggaagtcctggtgtgaaaggagccaagggcgggcctgggccccgcggacccaaaggcgagccggggcgcaggggagaccccggcaccaagggcagcccaggcagcgatggccccaagggggagaagggggaccctggccctgagggcccccgcggcctggctggagaggttggcaacaaaggagccaagggagaccgaggcttgcctggacccagaggcccccagggagctcttggggagcccggaaagcagggatctcggggagaccccggtgatgcaggaccccgtggagactcaggacagccaggccccaagggagaccccggcaggcctggattcagctacccaggaccccgaggagcacccggagaaaaaggcgagcccggcccacgcggccccgagggaggccgaggcgactttggcttgaaaggagaacctgggaggaaaggagagaaaggagagcctgcggatcctggtccccctggtgagccaggccctcgggggccaagaggagtcccaggacccgagggtgagcccggcccccctggagaccccggtctcacggagtgtgacgtcatgacctacgtgagggagacctgcgggtgctgcgactgtgagaagcgctgtggcgccctggacgtggtcttcgtcatcgacagctccgagagcattgggtacaccaacttcacactggagaagaacttcgtcatcaacgtggtcaacaggctgggtgccatcgctaaggaccccaagtccgagacagggacgcgtgtgggcgtggtgcagtacagccacgagggcacctttgaggccatccagctggacgacgaacatatcgactccctgtcgagcttcaaggaggctgtcaagaacctcgagtggattgcgggcggcacctggacaccctcagccctcaagtttgcctacgaccgcctcatcaaggagagccggcgccagaagacacgtgtgtttgcggtggtcatcacggacgggcgccacgaccctcgggacgatgacctcaacttgcgggcgctgtgcgatcgcgacgtcacagtgacggccatcggcatcggggacatgttccacgagaagcacgagagtgaaaacctctactccatcgcctgcgacaagccacagcaggtgcgcaacatgacgctgttctccgacctggtcgctgagaagttcatcgatgacatggaggacgtcctctgcccggaccctcagatcgtgtgcccagaccttccctgccaaacagagctgtccgtggcacagtgcacgcagcggcccgtggacatcgtcttcctgctggacggctccgagcggctgggtgagcagaacttccacaaggcccggcgcttcgtggagcaggtggcgcggcggctgacgctggcccggagggacgacgaccctctcaacgcacgcgtggcgctgctgcagtttggtggccccggcgagcagcaggtggccttcccgctgagccacaacctcactgccatccacgaggcgctggagaccacacaatacctgaactccttctcgcacgtgggcgcaggcgtggtgcacgccatcaatgccatcgtgcgcagcccgcgtggcggggcccggaggcacgcagagctgtccttcgtgttcctcacggacggcgtcacgggcaacgacagtctgcacgagtcggcgcactccatgcgcaacgagaacgtggtacccaccgtcctggccttgggcagcgacgtggacatggacgtgctcaccacgctcagcctgggtgaccgcgccgccgtgttccacgagaaggactatgacagcctggcgcaacccggcttcttcgaccgcttcatccgctggatctgctagcgccgccgcccgggccccgcagtcgagggtcgtgagcccaccccgtccatggtgctaagcgggcccgggtcccacacggccagcaccgctgctcactcggacgacgccctgggcctgcacctctccagctcctcccacggggtccccgtagccccggcccccgcccagccccaggtctccccaggccctccgcaggctgcccggcctccctccccctgcagccatcccaaggctcctgacctacctggcccctgagctctggagcaagccctgacccaataaaggctttgaacccaaaaaaaaaaa

SEQ ID NO: 184 - DNA, 2008 bp, Homo sapiens
tgggacactgctcagggaagagcctgctacggtggactgtgagactcagtgcactgtcctcctcccagcgaccccacgctggaccccctgccggaccctccacccttcggcccccaagcttcccaggggcttcctttggactggactgtccctgctcatccattctcctgccacccccagacctcctcagctccaggttgccacctcctctcgccagagtgatgaggtcccggcttctgctctccgtggcccatctgcccacaattcgggagaccacggaggagatgctgcttgggggtcctggacaggagcccccaccctctcctagcctggatgactacgtgaggtctatatctcgactggcacagcccacctctgtgctggacaaggccacggcccagggccaacccaggccaccccacaggccagcccaggcctgccggaagggccgccctgctgtgtccctgcgagacatcaccgcacgtttcagtggccagcagcccacactgcccatggctgatactgtggaccccctggactggctttttggggagtcccaggaaaagcagccaagccagagggacctgccaaggaggactggcccctctgctggcctctggggtccacatagacagatggacagcagcaagcccacgggggcccccagagggaggctctgtgaagccaggatgcctgggcattccctggcaagaccaccgcaggatgggcagcagagctctgacctaagaagctggacttttgggcagtctgcccaagccatggcctcccgccaccgcccccgccccagcagtgtcctcagaacactctactcgcacctcccggtgatccatgaactctgacccctccccagtaaaggcttctgtagagagcatgctgggtctgcatctcctctcgtctcctccatggtggtcactgcccctggcaggtctctgaaagggaaatgcttttctgcggaggcccctgcttgggcagttcacagtgagaccgaccccctctgaatatgataacagcctgtttcacatgaggagatgttaccaatcccgttcgctctgacccttgctggctgatcaccttgagcaacttacttaacatctgtgttcctcagtttctcatgggtaatatagggataattactggcacctgcctcccaggccattctgacgtgtaaccgcatataggagcccactggctgagtagctaccatcatcgctggtggggaaactggtggtaggggtgtgagggtagtgggggtgtcagccccccaggtgtttcagaacaaggcctcgggcactcccaagtctgcctcttggctcccaccctcaaagcccatgttctgcgaggcccaagagaacacatggagtcttagcaaatgcactaatgtattccgggggactgtcacctggcaccactggggcactctgctggctacaactcatacgtcctgtggtggcattgggagagttcccccatgatgagggccaagatagaatctgtaccactcagtgctaccatccccacccctacaccacttccacacaggggcctcatggcatggtcagggtcccagctgtaggtgagagcagggcactgtccagctgtccactggggaagtcaagatgtcctaaggcccaggtcagggcatctggagtctgaaggaccctagttcctagaggcatctggcagcaagaaggtgaggcatcagggaacgggaatcaggctgggactgatcagaggtgaagggacagagagaggagaggaggaagattgagctgggggcaacagccaagctcacctgggcaggtctctgccacctccttgctctgtgagctgtcagtctaggttattctctttttttgtggctatttttaattgctttggatttgttaaatgttttctgtcttctgttaagtgtgttttctctggagatagaatgtaaaccatattaaaaggaaaaagtttcagacaagcaaaaaaaaaaaaaaaaaaa

SEQ ID NO: 185 - DNA, 688 bp, Homo sapiens
atcctaatacgactcactataggactcgagcggccgcccgggcaggtgagacagacaaagcgttaggagaagaagagaggcagggaagacaagccaggcacgatggccaccttcccaccagcaaccagcgccccccagcagcccccaggcccggaggacgaggactccagcctggatgaatctgacctctatagcctggcccattcctacctcggaggtggaggccggaaaggtcgcaccaagagagaagctgctgccaacaccaaccgccccagccctggcgggcacgagaggaaactggtgaccaagctgcagaattcagagaggaagaagcgaggggcacggcgctgagacagagctggagatgaggccagaccatggacactacacccagcaatagagacgggactgcggaggaaggaggacccaggacaggatccaggccggcttgccacaccccccacccctaggacttattcccgctgactgagtctctgaggggctaccaggaaagcgcctccaaccctagcaaaagtgcaagatggggagtgagaggctgggaatggaggggcagagccaggaagatcccccagaaaagaaagctacagaagaaactggggctcctccagggtggcagcaacaataaatagacacgcacgtcagccacagcttgaaaaaaaaaaaaaaa

SEQ ID NO: 186 - DNA, 645 bp, Homo sapiens
gcggccaagatgagcacggaaggtggtggccgtcgctgccaggcacaagtgtcccgccgcatctccttcagcgcgagccaccgattgtacagtaaatttctaagtgatgaagaaaacttgaaactgtttgggaaatgcaacaatccaaatggccatgggcacaattataaagttgtggtgacagtacatggagagattgaccctgctacgggaatggttatgaatctggctgatctcaaaaaatatatggaggaggcgattatgcagccccttgatcataagaatctggatatggatgtgccatactttgcagatgtggtgagcacgactgaaaatgtagctgtttatatctgggacaacctccagaaagttcttcctgtaggagttctttataaagtaaaagtatacgaaactgacaataatattgtggtttataaaggagaatagctattggggttagcattgcacaaagcccagtttctttctgtgtttgaaaaagattttgatccccttggaatattaagaggtcaacacgtgattgttgtacgtacacattgtgctctggagtgcctatttattgaaatcattgtaagacctgttataaatttaagtctatttaaaactaaacttgtaatatacatcctg

SEQ ID NO: 187 - DNA, 1266 bp, Homo sapiens
cggctccgcccggctgccgcctaggatgaatatcatggacttcaacgtgaagaagctggcggccgacgcaggcaccttcctcagtcgcgccgtgcagttcacagaagaaaagcttggccaggctgagaagacagaattggatgctcacttagagaacctccttagcaaagctgaatgtaccaaaatatggacagaaaaaataatgaaacaaactgaagtgttattgcagccaaatccaaatgccaggatagaagaatttgtttatgagaaactggatagaaaagctccaagtcgtataaacaacccagaacttttgggacaatatatgattgatgcagggactgagtttggcccaggaacagcttatggtaatgcccttattaaatgtggagaaacccaaaaaagaattggaacagcagacagagaactgattcaaacgtcagccttaaattttcttactcctttaagaaactttatagaaggagattacaaaacaattgctaaagaaaggaaactattgcaaaataagagactggatttggatgctgcaaaaacgagactaaaaaaggcaaaagctgcagaaactagaaattcatctgaacaggaattaagaataactcaaagtgaatttgatcgtcaagcagagattaccagacttctgctagagggaatcagcagtacacatgcccatcaccttcgctgtctgaatgactttgtagaagcccagatgacttactatgcacagtgttaccagtatatgttggacctccagaaacaactgggaagttttccatccaattatcttagtaacaacaatcagacttctgtgacacctgtaccatcagttttaccaaatgcgattggttcttctgccatggcttcaacaagtggcctagtaatcacctctccttccaacctcagtgaccttaaggagtgtagtggcagcagaaaggccagggttctctatgattatgatgcagcaaacagtactgaattatcacttctggcagatgaggtgatcactgtgttcagtgttgttggaatggattcagactggctaatgggggaaaggggaaaccagaagggcaaggtgccaattacctacttagaactgctcaattaagtaggtggactatggaaaggttgcccatcatgactttgtatttatatacaattaactctaaataaagcaggttaagtatcttccatgttaatgtgttaagagactgaaaataccagccatcagaaactggcgtcgagtctaga

SEQ ID NO: 188 - DNA, 639 bp, Homo sapiens
atgaaggccactatcatcctccttctgcttgcacaagtttcctgggctggaccgtttcaacagagaggcttatttgactttatgctagaagatgaggcttctgggataggcccagaagttcctgatgaccgcgacttcgagccctccctaggcccagtgtgccccttccgctgtcaatgccatcttcgagtggtccagtgttctgatttgggtcttcctccttcccttacggaattacatcttgatggcaacaaaatcagcagagttgatgcagctagcctgaaaggactgaataatttggctaagttgggattgagtttcaacagcatctctgctgttgacaatggctctctggccaacacgcctcatctgagggagcttcacttggacaacaacaagcttaccagagtacctggtgggctggcagagcataagtacatccaggttgtctaccttcataacaacaatatctctgtagttggatcaagtgacttctgcccacctggacacaacaccaaaaaggcttcttattcgggtgtgagtcttttcagcaacccggtccagtactgggagatacagccatccaccttcagatgtgtctacgtgcgctctgccattcaactcggaaactataagtaa

SEQ ID NO: 189 - DNA, 4140 bp, Homo sapiens
  modified_base (319)..(319): a, c, g, t, unknown, or other
  modified_base (690)..(690): a, c, g, t, unknown, or other
  modified_base (1263)..(1263): a, c, g, t, unknown, or other
ggtttttttttttttttttttttttttttttttttttttttttttttttttttttttttttttttttttttttttttttttttttttaactgaatgcataactttattaaataaatgctttgtcatgacaaaagacaaagatcaaggagtaacataaattataagttgaataaatagtatacagcaatcttcactttttaagaaaatgtgagatcctttgttggttttttatttccttaagtacaaaatgctaaacgggagccgagctcttccgcattcaggtgttttttttttttttttcggcttttttttttttttnctcacaaactggttgcatttgttgatttatttttccatccttttcaccagtaaagattatcatcgtttatttttgtttttaaagttgaaaacaaaaaagaggagagaacagagttatggtatgaatgtatgtaaaactatagagaactacagtaatatgtactgtggttattgctgtcttcaaaaaaaaaaagaaaaagaaaaacaacaacaacaacaacgaaaacaaccggtaggcaactcggaatctgaaggaatcttgtctgacaactgtgctatccatgtgggctacggtgtgacagtggcggtagagaggagactccggctggcgaccggggactggtggagtggggtgagcgggcacagggaagnctggggtccccttcccctcggaccctccccaccttccctttccccatccaaaaggatttcaggagaggaggccagagtctgtgaaatgactaaactatatactccattagaaaaccaagaaagtatgtttgaaatagaaacaaaagcctaagagaaaataaaaagtggagaaacagtgcaatgtaattcttgcactttagtggttttaaaaacacagacagtacaaggcccaggttgctggctggtgaaacccctgtccctcgtccctcctccactttgcaaaacggagcctcctttctcttggaagccagacatatcctctctgacgctatggggtttcttctccttagagctcttctctgaggttcccattctgggccggagccctctcaggagtgagtggatgggtccggggtactgtcccaccttgaggggggcttggcggttgccgtggcagccctgtctcactaaccggtgcgtggcgggagcaggtggttgaggcccaccctctaggggaggccagccctgtgggggtaccatggaggccacagaggtggtggtggggagatgggntgggagagaaggggcatgatcagaaaagggcctccctggacctcgtgcgcctgccttcctcccctcatggggccagtgtccccaggcctgtctgtctaggcctggctgtcaaagaaaggttccagtctcttcctccccatgtgccctgctttgccaggtgggtcagggcaggctggaggaaggagggtcagtcctggctgggcttccctatctcctggcagtcgtgggaaagacagaggcatcttcctcactggtggagtgaggcacgaatctaaaggggatgggaagaccttctgtgggtgtgagcatgggagtgggcagcacttagattcggagccatggatagtccggagtccaaggtctctgggtgagcagacagtcggccaaaggccagcctggagtcaaagagaccagacccctgcttagattgccatactcgcaccattccaaacctgcctccctcacaccctgccatgggggaagaggtgccgtcttcctccagtgcctcccttcccaggatctccccaccctgggctcagccagaactcccatttgggaggcttagttccatgtgtccatgaaggcccagcttctctggggagtgaccagctgcccaggagaaactcctgcatgcagaagagactcacaggtttgggttcgcaggcacgaactttggaaaccggaagagtctggcgcacttacaccaggctctaatcccccacctgatggctggcagcaaagagccaacgcaaggggcagaagcctgctcaaagtccagacacagtccgtgaagagagagcccctctcaagaattaggtccaggctgggaggaatgtggggggagcttgtagttcctggctcagtcttttctcaggggagtggcaccccagtatccacttggcagatcctagttggataactgctcaagatgcaaagggagaatgggtggaaagaacagtgacgtggaagaggtttgggatactggcctaagacatacagaaacgtgagttgggtttaggggacagctgtgcagagagatggggcatgctgactcggcaggtcaaggccttgtggctgctggccctatcgggcccctttgtctcatgaagattgagcacttctcctgtccccagccaactgtcctgtccaggggcataggagatagcccccaagttctatagctatagggttcccatcagttgaaacagatttgctttttcgctattcctcttcgtagccccaaattcgttgttggaggcggtctccgctgtgtcatgccatgagcaaagagtgaagagagctgtgtccacagcacgaaggggtctccttggccagtgtccaagccccctttcctggatatcttcagccttaaagaacagtcacaaggccacccattggttgaggaagtcattggagaatgggagtttcggaatctggctgccgagtgacagcatccctgaatcatgcgttccctgcttgtcccagctttccttccatcctccaccccagggaggatgcagggactggccagaatggaggaagagctggaaagactcgtgggcctcagtccctcattgcaggctgaaggtgggcagcggagcacatagtcttgtcccttccaaagcatggccagtttagactgattcttcctatctggcttctaaagtctagcaccctcctaaagttactcaccttccctggctctgcggcctggattaagctcatttctattttgcaacccattcccccattttcctctctttcctctcaaatcctagaaaatacatatggtggggaagctaaggaaatttctattggcttttccccctttctgctgctttgtgccaaagctagaatggaacagtcagccccctctcccttcagccctctgttcctccccacatcgactctggccggaaccatccatcttactgttctcctgcatctaaacctttttgccaccatctccctctgccatctcttacttcagtctccctcctgctctgccagcatggagagtgagggaggcttccaaaaatgcacattctgttcagatgaaaggaaaaggctggggtgggactggtggatccatcgtggacctgttgggctcatgtggtgtggtgtccggagactgtgacttcctgagggtttaaagactaaaatgggatggactgaggcgcgtgctgtgtgcaccacggagggctggcctctgcctggctcggtgggtgcagatgaacacacgtggggaatcactgtcaaatccagtactgtgccccacaaaaaagctgagtttattgctcacgggaaactctgcctcgaggcaggcaaaaatgctattacgggttgtattaggagaatatgggttttctcagttttcccagaatgaggaagctcctcaatgcccctataggaactactttgaaaagttaatgcaaacctttgaaagaaaggaagaaagaaaaaaacaaagaaaaagaatagatttatatgcctatatatgactatatggagtcctgtagataaatacgagcccacttttttttttcagcctatcctcccccacagaggctgctgcgctacttacaaattgaattaaatgagggctgaaacggcacgcttcagcatgtactgtagtcaccgtggaagaacaagtctttccaatattggggcatgtattgatttctaaaaaatgtctgcctggggaatgaaatatgcacatgtatttcatattcacagatctgcttccgaaaacctctctatttaatatcactcaattatgaatttgttttgctttcagaggaatggaatgcattttagtttttataaatttggggagagacaacactctgcccaggtaagaggagaggaagttcaggg

SEQ ID NO: 190 - DNA, 3460 bp, Homo sapiens
  modified_base (377)..(377): a, c, g, t, unknown, or other
  modified_base (444)..(444): a, c, g, t, unknown, or other
  modified_base (674)..(674): a, c, g, t, unknown, or other
  modified_base (820)..(820): a, c, g, t, unknown, or other
  modified_base (827)..(827): a, c, g, t, unknown, or other
  modified_base (872)..(877): a, c, g, t, unknown, or other
  modified_base (979)..(979): a, c, g, t, unknown, or other
  modified_base (1074)..(1075): a, c, g, t, unknown, or other
  modified_base (1089)..(1089): a, c, g, t, unknown, or other
  modified_base (1186)..(1186): a, c, g, t, unknown, or other
  modified_base (1297)..(1297): a, c, g, t, unknown, or other
  modified_base (3146)..(3146): a, c, g, t, unknown, or other
  modified_base (3173)..(3174): a, c, g, t, unknown, or other
  modified_base (3176)..(3176): a, c, g, t, unknown, or other
  modified_base (3227)..(3228): a, c, g, t, unknown, or other
  modified_base (3421)..(3421): a, c, g, t, unknown, or other
ttttttttttttttttttttttttttttttttttatcattcaacattttatatcagaaaagatcagctttccaacatttattccatggaatgagtgcacagcattttcatgaactacctcagggctacatcagtacaaaatagtttaaattagtaaaataaagtagtttcaaagggaaatcattgacgacttcaggataagtgccaccaccatttgggaacagaggatagaaggtagccatgtggttattccatgatgcaggaatcaggtcggcaggtggactgtcattgctgtcttgcggcagctggcctctgccttcagggtaccaccgtctccaggacacaaatgggcagcagaaaaatgtcaccttgttgatnctcagcagctcatctattgggacaaaacttccatctcggccaagggaaatactctgttgagtgaccnagcggggcccagcccccagccctatttatctcatcaatatggttcagggaagataaaaaagagtgttctatgggatagaaaggtgggaataagaaaaaactaagtggctgggcatggtgagtcacgcctgtaatcccaacactttgggaggccaaggtgggcggatcacgaggtcgagattgagaccatcctggccaacacagtgaaaccccgtctctactaaaaatacnaaaattagccgggcgtggtggtgcacacctgtagtcccagctactcaggaggctgagacaggagaatcgcttgaatacgggaggcggaggctgcagtgagccgagacagtgctgcagtgagccgagatggcaccactgcactccangcctggngacaaagggagactctgcctccagaaaaaaaaaaaaaaaaaaaannnnnnggaaaggaaaagctaagcagatgacttatgtggcaaatgaggaatcaaattctctatttgtggtctgagatgccttttcctggcccagttttctgtccaaanggctcttttaacctccaagttatacactattaatggtaggcccatagtggggcggggtgtgatgagctggaaaagcatgatgtgcgtgtgcgtgnncgggggtggggccnatcatcagaatttgcacaggctgctgggaagagccatggctgtctgctgggaactctgctggggcaagcaagccctttgactctcctgcccatctcnagaatatttctaaaatgttttaaccagcaagttaaaaaaaaatttaaccctctttatatagataccctggacaccttttcttatggttcctccaagatgattataacttcngtctgacactatatattcctttaataacaaaatttcccagaaggctcacaaatcatggttggcagtgcagccttttcaatactggacacatcccatgctaaggccctctgcacagattttgtttactatcactggcgatcagcccaaacttctcaccccatatatcaacccaccccgatgtgtacaccaggtactatgtgacccacctactactggctaatgatgcaacttctgagagacccttgcaccctcactgcacgtcttgccacacaggtggcttggtgtcacgtactccctggcaccatctggttcatgccaggtttagagttcatcgtgtttggcttcctggtctttgagtttaaattcctcggctgtgaccttcccatctccattccggtcctggttggtgaacatattcttcacaatcagctcagcatcaaagccaggagcgagtttccctttgccagatgccacctgggcgtgaatgtactctgagaactcttccaggaggacttctccgttgccatccttgtcaatttcttcaaagaggttgggtgacacctcaccattccatatgaacatgtacccctcaggaaggccagccaccagctccagcagctcaatgtcaaacactaatacggcactgccgggcacttctccatccacgccagcttccccatagcccaggtgaggcggaatgatcactgtccgtttctcgccaacgcacatctctctgagacccatgtccatccccaacacaacttgcccagatcccagaacaatattgtaagttttgcctaaattccacgtggagtccagcagggtcccatccagaagtgaggcattgtagtgatatttgaggtaatctcccttcttactcagcactgagcagtcagggggtttgtagtgggaggtgatgctgatggagtccgaagggttgtggaagtcgatcacatggatgtcaaacaccagcacagccgagccggggatattccctcttccttcctctccataccccaggtgaggcgggaccacaatccttcgcttttctccaatgcaaacaccaagtagaccttcatccatcccaggaatcacgtagccctgcccaatgtacgtgtcaaacgtgcggttccgagagtagctggaatcaaagagggtgccatccagaagcgtgccattgtaatgatacctgagaaagtccccactttgacttatccgctcacagttttcaggtactaccttgttctcaatggaaatgctgtccttggggttatggaggtccaataatgcaacatcaaacaccagagatgcctgaccgggaatgtctttcccatctccatcctctccataggccagaaaaggaggaatggtgatgatgcgcttctcacccacacacatccccagcagccctttatccattccaggaatcagccagccaattcccacatacgtgtcatatgttttcatgcgattgtgactcgaatcaaacagagttccgtccaggaacgtcccgttgtagtggtacctcacaaaatcagacacctggatggtccgagggcaactcgggggcttgaaataggtgtgaatctgaacctggtcttcagaattccaaatatccatcagaagtacatcaaaatgaagcactgaattgggggggatcacaccagaaactccttcatttccgtaggcaagctttgggggaatcttcacgaaacgtctctcgtttacgcacatcccaacaagagcctggtccatccctgtgatcagctgtccttttcccacaaacacattgaaagtggagtctctgtcatagctggagtcgaacttctggccgtcggggaacgtcccnacgtagtggtagcgcacgaagtcgccnntngcgcacggtgcgcgggcactcgtcgggcacgaagcgccgctcgatctgcanntccgcgtcggagcccaggcccgccacgggcgctgcctgcccggtcacccagagcagcagcaggagcagcggtggcggcgggggcctccagccccggaacgccatcggggcggcgagaagagtggcgcggacgcagcgcggcgctcgggcggcacgggtcggcctgggcgttcggctgcgtttgcaaacgtggnccgggtctcctggccctacccgggctgcagccgccaccc

SEQ ID NO: 191 - DNA, 6934 bp, Homo sapiens
  modified_base (1128)..(1128): a, c, g, t, unknown, or other
  modified_base (1158)..(1158): a, c, g, t, unknown, or other
  modified_base (1266)..(1266): a, c, g, t, unknown, or other
  modified_base (1339)..(1339): a, c, g, t, unknown, or other
  modified_base (1341)..(1342): a, c, g, t, unknown, or other
  modified_base (1421)..(1421): a, c, g, t, unknown, or other
  modified_base (1531)..(1531): a, c, g, t, unknown, or other
  modified_base (1608)..(1608): a, c, g, t, unknown, or other
  modified_base (1617)..(1617): a, c, g, t, unknown, or other
  modified_base (1644)..(1644): a, c, g, t, unknown, or other
  modified_base (1647)..(1647): a, c, g, t, unknown, or other
  modified_base (1653)..(1656): a, c, g, t, unknown, or other
  modified_base (1935)..(1935): a, c, g, t, unknown, or other
  modified_base (1965)..(1965): a, c, g, t, unknown, or other
  modified_base (1974)..(1974): a, c, g, t, unknown, or other
  modified_base (2143)..(2143): a, c, g, t, unknown, or other
  modified_base (2297)..(2297): a, c, g, t, unknown, or other
  modified_base (2537)..(2537): a, c, g, t, unknown, or other
  modified_base (2802)..(2802): a, c, g, t, unknown, or other
  modified_base (3897)..(3897): a, c, g, t, unknown, or other
  modified_base (4442)..(4442): a, c, g, t, unknown, or other
  modified_base (4602)..(4602): a, c, g, t, unknown, or other
  modified_base (4791)..(4792): a, c, g, t, unknown, or other
  modified_base (4951)..(4951): a, c, g, t, unknown, or other
  modified_base (5054)..(5054): a, c, g, t, unknown, or other
  modified_base (5134)..(5140): a, c, g, t, unknown, or other
  modified_base (5239)..(5239): a, c, g, t, unknown, or other
  modified_base (5626)..(5627): a, c, g, t, unknown, or other
  modified_base (5629)..(5631): a, c, g, t, unknown, or other
  modified_base (5638)..(5638): a, c, g, t, unknown, or other
  modified_base (6123)..(6127): a, c, g, t, unknown, or other
  modified_base (6130)..(6133): a, c, g, t, unknown, or other
  modified_base (6137)..(6137): a, c, g, t, unknown, or other
  modified_base (6141)..(6141): a, c, g, t, unknown, or other
  modified_base (6143)..(6148): a, c, g, t, unknown, or other
  modified_base (6154)..(6155): a, c, g, t, unknown, or other
  modified_base (6157)..(6157): a, c, g, t, unknown, or other
  modified_base (6160)..(6161): a, c, g, t, unknown, or other
  modified_base (6163)..(6164): a, c, g, t, unknown, or other
  modified_base (6262)..(6262): a, c, g, t, unknown, or other
  modified_base (6286)..(6286): a, c, g, t, unknown, or other
  modified_base (6296)..(6296): a, c, g, t, unknown, or other
  modified_base (6315)..(6315): a, c, g, t, unknown, or other
  modified_base (6331)..(6332): a, c, g, t, unknown, or other
  modified_base (6336)..(6336): a, c, g, t, unknown, or other
  modified_base (6339)..(6340): a, c, g, t, unknown, or other
  modified_base (6358)..(6358): a, c, g, t, unknown, or other
  modified_base (6365)..(6367): a, c, g, t, unknown, or other
  modified_base (6369)..(6369): a, c, g, t, unknown, or other
  modified_base (6371)..(6383): a, c, g, t, unknown, or other
  modified_base (6387)..(6388): a, c, g, t, unknown, or other
  modified_base (6390)..(6390): a, c, g, t, unknown, or other
  modified_base (6405)..(6405): a, c, g, t, unknown, or other
  modified_base (6460)..(6460): a, c, g, t, unknown, or other
  modified_base (6563)..(6563): a, c, g, t, unknown, or other
  modified_base (6929)..(6929): a, c, g, t, unknown, or other
cgccgagtccgacttgcagctggcccagatcaaatgcaacctgggccgggccgtgcagctccaagagctgtggcccgggggcctcttctggaccaggaaactctccacatatattcgactttatgggagaaaatttagcaaagaagatcatgttctttttattaagttattgtatgagctggtatcaattccaaaactggaaatcagcatgatgcagggatttgcccgccttttgatcaacttgttaaagaaaaaggaacttctttcaagagctgatttggagttaccctggagaccactttatgacatggtagaaagaatattatattccaagacagagcacctaggattaaattggtttcctaattctgtagaaaatattctcaaaacactcgtgaaaagctgccgaccatattttccagcagatgccaccgctgagatgctagaagaatggcgacctttaatgtgcccttttgatgtaaccatgcaaaaggccatcacttattttgaaatatttcttcctacctcccttcctccagaacttcatcataaaggttttaaactttggtttgatgaattaattggcctttgggtttcagtgcaaaatctcccacaatgggaggggcaactagtaaatctctttgctcgattggctacagataatatagggtacatagattgggatccatatgtaccaaagatatttacaagaattctgagaagcttgaacctcccagtgggaagcagtcaagtgttagtcccaagatttttaacaaatgcttatgatataggacatgctgtaatatggatcaccgccatgatgggtggaccaagtaagctagtgcaaaaacacttagctggtttgtttaacagcatcacatctttttaccatccttcaaataatgggcgctggctgaacaagttaatgaaactacttcagcggttgccaaacagtgttgttagaagattgcatcgtgaaagatacaagaagccctcttggttaactcctgtgcctgatagccacaagcttactgatcaagatgttacagactttgtacaatgcattattcagcctgtcctcttggctatgtttagcaaaaccggtagtctagaagcagcccaggcttngcagaatcttgcactcatgagacctgaatnggtaataccccctgtacttgaaagaacatatcctgcattagagacattaacagaacctcaccagctcacagctactttaagttgtgtaattggagtagcccgcagttnggtatcaggaggcagatggtttcctgaaggtcctacacatatgctacctctgttgatgagagcattgcctggngnngatccaaatgactttagtaaatgcatgatcacattccagttcatagcaacattttctactctggtgcctttagtagatngttcatctgtactacaagaaagaaatgacctcacagaagtggaacgagaactttgttcagccacagctgaatttgaggatttcgtcttacagtttatggacagatgtttnggacttatagaaagtagcacattggagcaaacaagagaagagacagaaactgagaaaatgacacacttggagagttnggtcgaatnaggtctgtcttctacgtttagtacaantcntcaccnnnngttccaaagaaatatttatggtggcccttcagaaggtttttaatttttctacttcacatatatttgaaacaagagtagcaggtcgcatggtggcagacatgtgccgcgctgctgtaaagtgctgcccagaagaatctttgaagctctttgttccccactgctgcagtgttataactcagcttacaatgaatgatgatgtattaaatgatgaagagctagacaaggaattactatggaatcttcaacttttgtctgagattactcgagtggatggaaggnagttgcttctttatagggagcagcttgtanagattctcncaaagaaccctacatttaacctgtaagcagggttacactctgtcttgtaaccttttgcatcatcttctccgttctaccacacttatctaccctacagaatactgcagtgtgccaggtggctttgacaagcctccttctgaatactttcctatcaaggactggggcaaanccggggacttgtggaatctgggaatccagtggcatgttccttcttcagaagaagtgtcttttgccttttatcttttggactcctttcttcagcctgagctcgtcaaactccagcattgtggggatggaaaacttgaaatgtctagagatgatantctacagagtctgactatagtgcacaactgtttaattggctctggaaacctcctacctccgttgaaaggagagccagttactaacttagtaccaagtatggtgtccttggaagagacaaagttgtatactggacttgaatatgatctgtctcgagagaaccaccgagaagtaattgctacagttataaggaaacttcttaaccacatacttgataattcagaagatgatactaagtcatngtttcttattataaagattattggagaccttttacaattccaaggatctcacaagcatgaatttgactcccgatggaaaagcttcaacttagtaaagaaatcaatggaaaatcggctccatgggaaaaaacaacatatcagagcactgttgattgatagagtaatgttacagcatgagctacggacactaactgttgagggttgtgaatacaaaaagatacatcaagatatgatcagagatcttcttcgtttatctacaagttcntacagtcaggtgagaaataaggctcagcaaacattttttgctgccttgggagcatataacttctgttgcagagatatcattcccttggttttggagttcttaaggcctgatagacaaggtgttacacagcaacaattcaagggtgccttgtactgtctccttggaaatcacagtggtgtgtgcttggcaaaccttcatgattgggactgtattgtacagacgtggccagcgattgtttcttcagggcttagccaagcaatgtccctggaaaagccatcaatagtgagattgtttgatgatcttgcagaaaagattcataggcagtatgaaacaattggcttggacttcacaattccaaagtcatgtgttgaaatagcggaattacttcaacagtcaaaaaacccctctatcaaccagatattgcttagcccagaaaaaattaaggaaggaattaaacgccaacaggaaaagaatgccgatgccctaaggaactatgaaaatttggtagacaccttgctagatggtgtggagcaaagaaacctgccctggaaatttgaacatataggcattgggcttctgtctctactgctgagagatgaccgagtgttgcctcttcgtgccatacggttttttgttgagaatctcaaccatgatgcaattgtagttcgaaagatggctatctcagctgttgctggtatccttaaacagctaaaaagaacccacaaaaagctgaccattaacccctgtgaaatcagtggatgccctaaacccacccaaattattgctggtgataggcctgataatcattggttgcattatgacagcaaaactataccaagaactaaaaaagaatgggagtcaagttgctttgtggaaaaaactcactggggatactacacctggccaaagaatatggttgtttatgctggtgtggaagagcagcctaagcttggcagaagcagggaggatatgacagaggcagaacagattatatttgatcatttttctgatcctaaatttgttgagcagttaattacttttctatcattagaagacagaaaaggaaaagataagtttaatccacgacgtttttgnctctttaagggtatattcaggaattttgatgatgccttcctgccagttctgaagccccatttagaacatttggttgcagattcacatgaaagcacccagcgatgtgttgcagaaattatagctggtttaatcagaggttctaagcactggacatttgaaaaggtggagaagctttgggagcttctgtgccctctgcttagaacagcactgtccaatattaccgtagaaacttataatgactggggagcttgtatagcaacatcctgtgaaagcagagatccccggaaacttcactggctttttgaactgctgttggaatcaccattgagtggtgaaggaggatcctttgtagatgcatgtcgactttatgtactacaaggtggccttgcccagcaagaatggagagtgcctgaactattgcacagactactgaagtacttggaacccaaactcacccaggtttacaaaaatgtcagagaaagaataggaagtgtgctgacctacatattcatgatagatgtatctttgccaaataccacaccaanccatatcgcctcatgtccctgagtttactgctcgaattctggagaaattgaaacctctcatggatgtggatgaagaaattcagaaccatgttatggaagaaaatggaattggtgaagaagatgagcgaactcagggcattaaactcttgaaaaccatatngaaatggctgatggcaagtgcaggaagatccttttctacagcagttacagaacaacttcagcttctacctttgtttttcaagattgccccagtggaaaatgacaatagctacgatgaactgaaaagagatgcaaagttatgtttatcattaatgtctcaggggttgctttaccctcatcaagtgccttnnggtacttcaggtgctaaaacaaacagcaagaagcagttcttggcatgcacgatacacagtactgacctacctccagaccatggtattttataacctctttattttcctaaacaatgaagatgcagttaaagatatcaggtggctggttataagtctttnggaggacgaacaactggaggttcgagaaatggctgctactaccttaagcggtctgctacagtgtaactttcttaccatggacagtcctatgcagattcatttngagcaactttgcaaaacaaaactacctaagaaaagaaagcgagaccctggttctgtaggagataccattccttctgcagnnnnnnnagttggtcaaacgccatgctggggtgctaggacttggtgcatgtgttctttctagtccttacgatgttcccacctggatgccccagctcctcatgaatntcagtgcacatctaaatgatcctcagcctattgagatgactgtaaaaaaaaccttatccaatttccgaaggactcaccatgacaactggcaggaacataaacagcaattcactgatgaccaactgcttgttctcaccgatcttcttgtgtcaccatgctattatgcatagaaagatgactagtcctcacttcaggctcttttcatcaaaaattccacaccctcaggtaccatctgtggtggctctctgcaagttttaaaactgcctctgctgagctctcatcattttggtggtttctgtgttagatctcgttagtctgcattccacagcttctcagttgccatttgatttcccaacttgtccggaagtgtttccagaatactgatcnntnnnttttttngaggcatctgacaaagtcacaaagtctcagactagaaataattacccagtatgatcatggcatccaagaccagagtctcagaactcattaagaaacagtttacttggaatggagaatacccatctgtaatacaggtcctgtcatttcattcatctcaaattattttgaattcttcccaaatggctgctggatttaggtggtaataggggctgtgggccataaatctgaagccttgagaaccttgggtctggagagccatgaagagggaaggaaaagagggcaagtcctgaacctaaccaatgacctgatggattgctcgaccaagacacagaagtgaagtctgtgtctgtgcacttcccacagactggagtttttggtgctgaatagagccagttgctaaaaaattgggggtttggtgaagaaatctgattgttgtgtgtattcaatgtgtgattttaaaaataaacagcaacaacaataaaaannnnnaannnnaaanaaanannnnnnaaaaannanaannannttttgaccctctgaaaattattatacttcacctaaatggaagactgctgtgtttgtggaaattttgtaattttttaatttattttattctctctcccntttttattttgcctgcagaatcgnttgagagacntaataaggcttaatatttnaattgatttgtttaannatgntannataaatgtaaaagagtgntataaannngnannnnnnnnnnnnncaanncnattgtacagatgcanccttttacacaacatcattgtgtaatttgtaaagattcacgtgtagttctttatnatagtgattttgggctttgtacccactgaatgccattttttgtgtttttaaattattttctttatcttgttacaaaaactgagatgtggggtttttttttttncagttcacttatcattagaatgtctgaacttttatgtaacatttttgtgtgcatctctcaatgctaacaccacatgtttgcctatgacaagtttatagagtgaaaggtatcttctgggttgaaataattcacaaattggtgaatgtcatcttgcaacacaccctgtacagtcttccttaaaggaacactacagtatatttttagtatctacatgctgaatgactgaatacagacctaagcacagcagtggtcctggtacagtatttaagtgtcggcatacacaggcgtaatccctgtataaagtagtgccaaactgatttcagttgtgtaactagtttaaaacccaataaatggattctttttaanaaaaa

SEQ ID NO: 192 - DNA, 2272 bp, Homo sapiens
  modified_base (117)..(117): a, c, g, t, unknown, or other
  modified_base (120)..(120): a, c, g, t, unknown, or other
  modified_base (122)..(122): a, c, g, t, unknown, or other
  modified_base (124)..(124): a, c, g, t, unknown, or other
  modified_base (126)..(129): a, c, g, t, unknown, or other
  modified_base (143)..(145): a, c, g, t, unknown, or other
  modified_base (148)..(148): a, c, g, t, unknown, or other
  modified_base (152)..(153): a, c, g, t, unknown, or other
  modified_base (595)..(595): a, c, g, t, unknown, or other
  modified_base (1197)..(1198): a, c, g, t, unknown, or other
  modified_base (1215)..(1215): a, c, g, t, unknown, or other
  modified_base (1219)..(1219): a, c, g, t, unknown, or other
  modified_base (1232)..(1232): a, c, g, t, unknown, or other
  modified_base (1234)..(1234): a, c, g, t, unknown, or other
  modified_base (1240)..(1242): a, c, g, t, unknown, or other
  modified_base (1250)..(1253): a, c, g, t, unknown, or other
  modified_base (1258)..(1259): a, c, g, t, unknown, or other
  modified_base (1287)..(1287): a, c, g, t, unknown, or other
  modified_base (1333)..(1334): a, c, g, t, unknown, or other
  modified_base (1369)..(1369): a, c, g, t, unknown, or other
  modified_base (1381)..(1381): a, c, g, t, unknown, or other
  modified_base (1385)..(1388): a, c, g, t, unknown, or other
  modified_base (1390)..(1390): a, c, g, t, unknown, or other
  modified_base (1396)..(1397): a, c, g, t, unknown, or other
  modified_base (1399)..(1399): a, c, g, t, unknown, or other
  modified_base (1417)..(1418): a, c, g, t, unknown, or other
  modified_base (1584)..(1584): a, c, g, t, unknown, or other
  modified_base (2199)..(2202): a, c, g, t, unknown, or other
  modified_base (2205)..(2209): a, c, g, t, unknown, or other
gtaaattcacaaagctttggaaggagaagcaataaatttttgttttcaaatggcttgatgtaccttttttcctgttgctcttgaaatatgtttaactcctcatgagagaaccctggnttntntntnnnntttttttttttttnnnttntttnntggtcagcagctacctttatttggatcacacacgtgagtcagacagtaccactaatcgggccaatatggcttgtgagcaaaatgggtgaaaatagagggaactgactgggacctgttgtctaacatcattttaaggttgaacttgagcaaagacttagagaaagctgatggaatgccaagcatcaacgtgaagagaccctctatgcacacagtggatatgttatgcctggctgtagccaccttctcttctgaaaacaagatgggaatgacggaactgtattaaaagattaagttatccactagggagcatactagcacacttccagatcagccttgagatgctagacttcagatacagggacttgtgtcaggtggcctctagaaatgtggaagactaagatttagaaataaactaatttaaaagcaaacaaacaaaaaaaanctttcgcctaggatgatctgtttacaacagaaacaaaaacattttccagtttaatccatttgactgaaagtcattgttgggctgacccttaaggaaaacttaagtttaaacttcctttgcatagtatgttttctcttttttccttgggttagaggtgggaacaagaaaacattgatatagttttgaattaacattaaagaggcaaaatttcacatttaaaatggcccaaaatatcccactattcattttgctgacaggtgatacactcttgagaatcaggagtggagggtttagtcataagcatatatgctgtgggtcaggtgactcatgaacatgtcaaacaggccatgttctttagcagtttctggtctggtcctgcttttagtaatcttgcggtggaactcaggcacacagttatttggtaccacttccttataacctagcccacacccctttgcccaccctcaagccgatcggtctgttcatcccagtgcccttagaaggtgaaggtttgggctgggcccagtggttcacgtctgtaatcccagcacttagggagactgaggtgggcagatcacttgagcctaggcgttcgagaccannacctgggcaacatggcnaaanccctgtctccacnancacacnnnaaaaaaannnnaaacnnaattagccatacgtgttggtacacaccntgtagttctagctacttgggaggctaaggaagatggcttgagcccnnggaggcggaggttgcagtgagccgagatcatgccnctgccctttacntccnnnncntgggcnnancagagtgagactgtcttnnaaaaaaaaaaaaaaatggaagaaggtgagggtttgacatggttcctgacaccatcttgctcttgtgcattgctgccagtgtttcaaatgctgctgaagacgtgggttctgagcagtgttccttgtattgtatccaacaagcaaccaccctgtaggcatctctaccntgggccagtggttgtttccttcattttttttttcttttctcttcatacttgtagtaggggctccgcaacatgaaaattaaaagtatgaatgggatgagtaagtagggggcatagacagacacaagggttaaccgttcatgcaaagtctcaggtctttgtcccttgaaaccactggctttggagaaatcctcaaacagaaatgtggagagtatcggaattaaggttgtcatggtgtgaacagagtagatgattgcaggagttcgaatccacttgcagcttcctttgaggaaggcatacgttgcaatgggaaagaaaggcagctgaaacacaagctcgcaaaacagaaaggacttaaaccaggctgggggctcctgtagcagtgggtctttgaactccttagcataccacttcagcaggtttctaaactcgactgggtagagctcgcgcggcagcaccgcctgcaggtccatgaacagggtgatggggatgtggctgaggaagtagaggcccagcagccactccacgcagcgcctggttgccggagcccccatagtctgtcggttgggcctggacccgctgatgtgagaagaggggccaaatccgcgcgccttcccnnnnccnnnnncctcggtcgccgccttgcccccgcgagggctaggcagaccgcttccattggctggcgagaaga

SEQ ID NO: 193 - DNA, 1131 bp, Homo sapiens
  modified_base (27)..(27): a, c, g, t, unknown, or other
  modified_base (44)..(44): a, c, g, t, unknown, or other
  modified_base (58)..(59): a, c, g, t, unknown, or other
  modified_base (65)..(65): a, c, g, t, unknown, or other
  modified_base (69)..(69): a, c, g, t, unknown, or other
  modified_base (83)..(83): a, c, g, t, unknown, or other
  modified_base (85)..(86): a, c, g, t, unknown, or other
  modified_base (90)..(90): a, c, g, t, unknown, or other
  modified_base (122)..(122): a, c, g, t, unknown, or other
  modified_base (138)..(139): a, c, g, t, unknown, or other
  modified_base (179)..(179): a, c, g, t, unknown, or other
  modified_base (183)..(183): a, c, g, t, unknown, or other
  modified_base (187)..(187): a, c, g, t, unknown, or other
  modified_base (208)..(208): a, c, g, t, unknown, or other
  modified_base (224)..(224): a, c, g, t, unknown, or other
  modified_base (349)..(350): a, c, g, t, unknown, or other
  modified_base (355)..(355): a, c, g, t, unknown, or other
  modified_base (362)..(379): a, c, g, t, unknown, or other
  modified_base (382)..(385): a, c, g, t, unknown, or other
  modified_base (388)..(388): a, c, g, t, unknown, or other
  modified_base (396)..(396): a, c, g, t, unknown, or other
  modified_base (398)..(398): a, c, g, t, unknown, or other
  modified_base (1030)..(1030): a, c, g, t, unknown, or other
  modified_base (1104)..(1104): a, c, g, t, unknown, or other
  modified_base (1120)..(1120): a, c, g, t, unknown, or other
  modified_base (1123)..(1123): a, c, g, t, unknown, or other
  modified_base (1128)..(1128): a, c, g, t, unknown, or other
gcagatgagccttccggtgtctcctcnccccagtgtgtcatttnccagcagtggaccnnagcccnacgnttacaaggactgcntnntccncggcccccaccatcatcaccacagtctgtttnggctatacttcccccnncccaccagccttgtaattggctaattactggagatgaatnttgntaancagaagccttcttctcttctnccatctgcttctccantatttgcccattgtacaccccccttttcctcccactgaagccccagttagtcagcagggcctagagtccctgtccccttttgagtacagccaagtgggggattccccagctcttaagtattgggnnagganccagggnnnnnnnnnnnnnnnnnnttnnnnttntttttttntnttcaggggtactgccaggtagcaggctttattgggaagggacaaagcctcaggagctgggtgccccagaggctgctgggtcttgagccacagctgcagccaatgcagcagctcgcgcctccttcttccgtttctgtttttcctccttgaggcgcttgcgctccttcttctctaggtcctggagcagctcctggaagcgggcactccttgggtccacctggtagcccaggagctcctgggcctcagcctgcagtcgggccctcctctccttgtcagcctgggccttctcccagttctcccgctgctgctgctgccagttcacaatcatctgtggcatcttggccatgcactctgcgatgtgctgctccctctcccgacgcttctgctcttcggccagctgcttcacccgcagcgactcctgcatggtcgccaggctcgggtaccattcgcgttcttcggcctccagctcccgcagctgctccggcgacggccataacgaaccggggaccaccccggaggcggcgccgtaacgcgcgaactgcttagccgcgtagcgcggtcccagctgccaccgcggggtcaggaggtcctcggggtctggccaccggggtcccggcctgcggcgcgggggcngccgcgcccggtagccacgggaacccggggccagggtcgccgccacacctagtaggctgcgtgcctgtcgcacnggacgccgccatcttngcngtgcnggc

SEQ ID NO: 194 - DNA, 467 bp, Homo sapiens
  modified_base (16)..(17): a, c, g, t, unknown, or other
  modified_base (29)..(29): a, c, g, t, unknown, or other
  modified_base (311)..(311): a, c, g, t, unknown, or other
  modified_base (314)..(314): a, c, g, t, unknown, or other
  modified_base (318)..(318): a, c, g, t, unknown, or other
  modified_base (321)..(321): a, c, g, t, unknown, or other
  modified_base (430)..(441): a, c, g, t, unknown, or other
  modified_base (443)..(443): a, c, g, t, unknown, or other
  modified_base (456)..(456): a, c, g, t, unknown, or other
tttttttttttttttnntttttttttttnttgagacacaaaatttaatttaatagaaattttgtttgtagttcttacattctcagtgtgagccaatctgggacccactgccccacccagaagtggcccagtcctgggggcaggggagaaagggaggggtgaaatgagaagagccccgttcttcctcagtgctggggggttggagacaccacccccttctgctgccctcctctgggctccaggaaggagagcagatgaaatctcaggcctgtggcttctccacaccactgccccccaggttggaggggagcnaanaganganagaaggggacagaggcaagaaaagatgttgatcaagaaagatgagaaccaggggtgagggctgaaggagaatcaaagataaaataccagtttaaaaaaaaaaaaaaaannnnnnnnnnnnanaaaaaaaaaaaanaaaaaaaaaaa

SEQ ID NO: 195 - DNA, 743 bp, Homo sapiens
  modified_base (1)..(1): a, c, g, t, unknown, or other
  modified_base (3)..(3): a, c, g, t, unknown, or other
  modified_base (465)..(465): a, c, g, t, unknown, or other
  modified_base (616)..(616): a, c, g, t, unknown, or other
  modified_base (618)..(618): a, c, g, t, unknown, or other
  modified_base (638)..(638): a, c, g, t, unknown, or other
  modified_base (660)..(660): a, c, g, t, unknown, or other
  modified_base (663)..(663): a, c, g, t, unknown, or other
  modified_base (671)..(671): a, c, g, t, unknown, or other
ntntttttttttttttttttttttttgacctggaccctctgcatctcagaaaggtttattatcaattgaaggaggtaacatgtagcctttgctggggacaaagatgcaacaagtctctgccccatcctaggtgctgccccgtgtagggctcttcccaggcccgccccccttgggcagcctggtagcgctgggctggcgtggcatcctctggctggatccttcgcggctgctgcgttccgccagggccaatgctcccccgagggcagcgctgcctttgtttctccctcgggtctcgggcacgctcgacgtgggcagagacacggccgcagggtcctggggctcgctcgctagcctctgcccggcacacatggacttgagcatctggaagacggcgaggggggccacgttcagcttcagcaggtccaccaggatcttgaacacgtcggggtcgatagcgccgcccgnccgcctgcgccagctcgtacagctccatctcctcggtgctcagcaccttcttccgccgcagcgccagcttctgccgggccgcctccagccccgggggcgccgccgaccccggcccaggccctacgccctgcgccgccatccccgcggcccncngaaaggtgcgctccgccccngccgcgccccctagcggctgcngcnccaccacncctctccctgcagcgtcaacgtctggcctcccgggctgcctggcgggaggggcgggagcgcggggacccgct

SEQ ID NO: 196 - DNA, 1735 bp, Homo sapiens
  modified_base (973)..(973): a, c, g, t, unknown, or other
  modified_base (1300)..(1301): a, c, g, t, unknown, or other
  modified_base (1480)..(1480): a, c, g, t, unknown, or other
  modified_base (1492)..(1492): a, c, g, t, unknown, or other
  modified_base (1497)..(1497): a, c, g, t, unknown, or other
  modified_base (1508)..(1508): a, c, g, t, unknown, or other
  modified_base (1519)..(1520): a, c, g, t, unknown, or other
  modified_base (1530)..(1530): a, c, g, t, unknown, or other
  modified_base (1537)..(1537): a, c, g, t, unknown, or other
  modified_base (1552)..(1552): a, c, g, t, unknown, or other
  modified_base (1566)..(1566): a, c, g, t, unknown, or other
  modified_base (1568)..(1568): a, c, g, t, unknown, or other
  modified_base (1607)..(1607): a, c, g, t, unknown, or other
  modified_base (1660)..(1660): a, c, g, t, unknown, or other
  modified_base (1675)..(1675): a, c, g, t, unknown, or other
ttttttttttttttttttttttttttttttttttttctgtagcatagctcattttattgtttaaacagtttttgcataggaaatatatccgcttccagtaattgactgcagtatgagcagctgctagcagtataggctggatataacagtaacaatcacattaagtcaagcttgatttacaccagtttaaaacttgtggcaattgagttcatttgcaacccacaaaaagtacccaaagaacgttatcctccaaccgggcacaataaaaccttcactaacattctggcccagtctggggttgatcccagaggcctgaactctagaaattaagtaactgtcgtataatacatcctactgctaaaggtttgttacatggagattgtgcatgtgcctccttttgtaaaaaaatttaattaaaatacaaggttctgtatttatggcccatgaggacaaaatgccaaaagttttaaaatggatcaaccctggtgtgtagctagcaagcaataactgactactcgtcacctacagttgtactaaatgtatctaaagaaacacacagtcctacaaaagttgttctcagagaaatatcattgaggtgggggcagctcttcccaggatgctaaaagttctatatgatataagcacaaattaacagcttgatgaagacataatctactgcagctttgagaaacctatgcctgggatgtagttacccctcacattctacaatgttgtagagattttttttcccaagaaaatgtcatttgaaacatatttacaactgaactcaacagagactgtgaaattgaacaggcactgctcatttgtttgagttttttggtaaacattttgctggtttttttttttttgtttgtttctttcttgttttgcatcaacttttatcagtccatgcaacttcaatgccctcgatgaaggatgcataaaaagccatacttcttaaaaaaaaaaaaangaaaaaaaaagacttccttctgcataaagagatatatttgccacatcagtccctgtagcacagttttcaaaaccattctgtcaaaaatacagtaatacaagactggctttagtgtcactagcttacactgcttttcatgtatttaggccacctgttgttcctggtactgtatcatgcaataagtcatcaagggcttagtctagtgtaccggtaagctagtggcactgaagcgcttttcacaatctcaacatacatttgaattgcaacacacagatatttctagagtattaactagtgaacccttttattattaaaaaaaaaaaaaannctacttacaaccattgaagaaaaaattgcaacaaaaaatgtaaaaattgaccgtctccaacttgtcccctttactattaacaatgtgaccaacagatctgtggcacggacacagtacaaagagttgtcatggcaatgagtttggctgatgcaaaggtcattgtgcagggtcaaagggcnaaaatcagtggnccatngttaccccccnactgcagggcnntccactccanccacacnattttagggaattanaaaaaacagggganantaccagaaagtgccaaatatgaagaaggcagctttcagntccttcagcatggagtagaacattcatttttgagcttttactattgaacttgnatagcctgcacattnaaaaaaaaaaaaaaaaaaaaagggcggccggctcgcgatctagaactagtcggacgcgtg

SEQ ID NO: 197 - DNA, 1735 bp, Homo sapiens; identical to SEQ ID NO: 196
  modified_base (973)..(973): a, c, g, t, unknown, or other
  modified_base (1300)..(1301): a, c, g, t, unknown, or other
  modified_base (1480)..(1480): a, c, g, t, unknown, or other
  modified_base (1492)..(1492): a, c, g, t, unknown, or other
  modified_base (1497)..(1497): a, c, g, t, unknown, or other
  modified_base (1508)..(1508): a, c, g, t, unknown, or other
  modified_base (1519)..(1520): a, c, g, t, unknown, or other
  modified_base (1530)..(1530): a, c, g, t, unknown, or other
  modified_base (1537)..(1537): a, c, g, t, unknown, or other
  modified_base (1552)..(1552): a, c, g, t, unknown, or other
  modified_base (1566)..(1566): a, c, g, t, unknown, or other
  modified_base (1568)..(1568): a, c, g, t, unknown, or other
  modified_base (1607)..(1607): a, c, g, t, unknown, or other
  modified_base (1660)..(1660): a, c, g, t, unknown, or other
  modified_base (1675)..(1675): a, c, g, t, unknown, or other

SEQ ID NO: 198 - DNA, 1192 bp, Homo sapiens
  modified_base (2)..(11): a, c, g, t, unknown, or other
  modified_base (13)..(13): a, c, g, t, unknown, or other
  modified_base (15)..(17): a, c, g, t, unknown, or other
  modified_base (432)..(432): a, c, g, t, unknown, or other
  modified_base (442)..(442): a, c, g, t, unknown, or other
  modified_base (700)..(700): a, c, g, t, unknown, or other
  modified_base (714)..(716): a, c, g, t, unknown, or other
  modified_base (721)..(721): a, c, g, t, unknown, or other
  modified_base (727)..(727): a, c, g, t, unknown, or other
tnnnnnnnnnntntnnntttttttttttttttttttttttccctcttgtgctcagtcgccctgttcttgaggtctcttttctctactccatggttctcaatttatttggggggaaataccttgagcagaatacaatgggaaaagagtctctacccctttctgttcgaagttcatttttatcccttcctgtctgaacaaaaactgtatggaatcaacaccaccgagctctgtgggaaaaaagaaaaacctgctcccttcgctctgctggaagctggagggtgctaggcccctgtgtagtagtgcatagaattctagcttttttcctcctttctctgtatattgggctcagagagtacactgtgtctctatgtgaatatggacagttagcatttaccaacatgtatctgtctactttctcttgtttaaaaaaanaaaaaaaaancttaaaaaaatggggttatagaaggtcagcaaagggtgggtttgagatgtttgggtgggttaagtgggcattttgacaacatggcttctcctttggcatgtttaattgtgatatttgacagacatccttgcagtttaagatgacacttttaaaataaattctctcctaatgatgacttgagccctgccactcaatgggagaatcagcagaacctgtaggatcttatttggaattgacattctctattgtaattttgtncctgtttatttttnnnttttntttttntttcactggaaaggaaagatgatgctcagttttaaacgttaaaagtgtacaagttgctttgttacaataaaactaaatgtgtacacaaaggatttgatgcttttctctcagcataggtatgcttactatgaccttccaagtttgacttgtataacatcactgtcaaactttgtcaccctaacttcgtattttttgatacgcactttgcaggatgacctcagggctatgtggattgagtaatgggatttgaatcaatgtattaatatctccatagctgggaaacgtgggttcaatttgccattggtttctgaaagtattcacatcatttgggataccagatagctcaatactctctgagtacattgtgcccttgatttttatctccaagtggcagtttttaaaattggccttttacctggatataaattaattgtgcctgccaccaccatccaacagacctggtgc

SEQ ID NO: 199 - DNA, 6691 bp, Homo sapiens
  modified_base (276)..(279): a, c, g, t, unknown, or other
  modified_base (285)..(285): a, c, g, t, unknown, or other
  modified_base (726)..(729): a, c, g, t, unknown, or other
  modified_base (732)..(732): a, c, g, t, unknown, or other
  modified_base (735)..(736): a, c, g, t, unknown, or other
  modified_base (868)..(868): a, c, g, t, unknown, or other
  modified_base (1207)..(1207): a, c, g, t, unknown, or other
  modified_base (1212)..(1212): a, c, g, t, unknown, or other
  modified_base (1471)..(1471): a, c, g, t, unknown, or other
  modified_base (3905)..(3905): a, c, g, t, unknown, or other
  modified_base (4034)..(4034): a, c, g, t, unknown, or other
  modified_base (4951)..(4951): a, c, g, t, unknown, or other
  modified_base (5086)..(5086): a, c, g, t, unknown, or other
  modified_base (5810)..(5810): a, c, g, t, unknown, or other
  modified_base (5817)..(5817): a, c, g, t, unknown, or other
  modified_base (5874)..(5875): a, c, g, t, unknown, or other
  modified_base (5884)..(5884): a, c, g, t, unknown, or other
  modified_base (5889)..(5889): a, c, g, t, unknown, or other
  modified_base (5891)..(5891): a, c, g, t, unknown, or other
  modified_base (5898)..(5898): a, c, g, t, unknown, or other
  modified_base (5908)..(5908): a, c, g, t, unknown, or other
  modified_base (5924)..(5924): a, c, g, t, unknown, or other
  modified_base (6004)..(6004): a, c, g, t, unknown, or other
  modified_base (6639)..(6641): a, c, g, t, unknown, or other
atgaaatggaaacatgttccttttttggtcatgatatcactcctcagcttatccccaaatcacctgtttctggcccagcttattccagaccctgaagatgtagagagggggaacgaccacgggacgccaatccccacctctgataacgatgacaattcgctgggctatacaggctcccgtcttcgtcaggaagattttccacctcgcattgttgaacacccttcagacctgattgtctcaaaaggagaacctgcaactttgaactgcaaagctgannnncgcccnacacccactattgaatggtacaaagggggagagagagtggagacagacaaagatgaccctcgctcacaccgaatgttgctgccgagtggatctttatttttcttacgtatagtacatggacggaaaagtagacctgatgaaggagtctatgtctgtgtagcaaggaattaccttggagaggctgtgagccacaatgcatcgctggaagtagccatacttcgggatgacttcagacaaaacccttcggatgtcatggttgcagtaggagagcctgcagtaatggaatgccaacctccacgaggccatcctgagcccaccatttcatggaagaaagatggctctccactggatgataaagatgaaagaataactatacgaggaggaaagctcatgatcacttacacccgtaaaagtgacgctggcaaatatgtttgtgttggnnnntancannatggttggggaacgtgagagtgaagtagccgagctgactgtcttagagagaccatcatttgtgaagagacccagtaacttggcagtaactgtggatgacagtgcagaatttaaatgtgaggcccgaggtgancctgtacctacagtacgatggaggaaagatgatggagagctgcccaaatccagatatgaaatccgagatgatcataccttgaaaattaggaaggtgacagctggtgacatgggttcatacacttgtgttgcagaaaatatggtgggcaaagctgaagcatctgctactctgactgttcaagaacctccacattttgttgtgaaaccccgtgaccaggttgttgctttgggacggactgtaacttttcagtgtgaagcaaccggaaatcctcaaccagctattttctggaggagagaagggagtcagaatctacttttctcatatcaaccaccacagtcntccanccgattttcagtctcccagactggcgacctcacaattactaatgtccagcgatctgatgttggttattacatctgccagactttaaatgttgctggaagcatcatcacaaaggcatatttggaagttacagatgtgattgcagatcggcctcccccagttattcgacaaggtcctgtgaatcagactgtagccgtggatggcactttcgtcctcagctgtgtggccacaggcagtccagtgcccaccattctgtggagnaaggatggagtcctcgtttcaacccaagactctcgaatcaaacagttggagaatggagtactgcagatccgatatgctaagctgggtgatactggtcggtacacctgcattgcatcaacccccagtggtgaagcaacatggagtgcttacattgaagttcaagaatttggagttccagttcagcctccaagacctactgacccaaatttaatccctagtgccccatcaaaacctgaagtgacagatgtcagcagaaatacagtcacattatcgtggcaaccaaatttgaattcaggagcaactccaacatcttatattatagaagccttcagccatgcatctggtagcagctggcagaccgtagcagagaatgtgaaaacagaaacatctgccattaaaggactcaaacctaatgcaatttaccttttccttgtgagggcagctaatgcatatggaattagtgatccaagccaaatatcagatccagtgaaaacacaagatgtcctaccaacaagtcagggggtggaccacaagcaggtccagagagagctgggaaatgctgttctgcacctccacaaccccaccgtcctttcttcctcttccatcgaagtgcactggacagtagatcaacagtctcagtatatacaaggatataaaattctctatcggccatctggagccaaccacggagaatcagactggttagtttttgaagtgaggacgccagccaaaaacagtgtggtaatccctgatctcagaaagggagtcaactatgaaattaaggctcgccctttttttaatgaatttcaaggagcagatagtgaaatcaagtttgccaaaaccctggaagaagcacccagtgccccaccccaaggtgtaactgtatccaagaatgatggaaacggaactgcaattctagttagttggcagccacctccagaagacactcaaaatggaatggtccaagagtataaggtttggtgtctgggcaatgaaactcgataccacatcaacaaaacagtggatggttccaccttttccgtggtcattccctttcttgttcctggaatccgatacagtgtggaagtggcagccagcactggggctgggtctggggtaaagagtgagcctcagttcatccagctggatgcccatggaaaccctgtgtcacctgaggaccaagtcagcctcgctcagcagatttcagatgtggtgaagcagccggccttcatagcaggtattggagcagcctgttggatcatcctcatggtcttcagcatctggctttatcgacaccgcaagaagagaaacggacttactagtacctacgcgggtatcagaaaagtcccgtcttttaccttcacaccaacagtaacttaccagagaggaggcgaagctgtcagcagtggagggaggcctggacttctcaacatcagtgaacctgccgcgcagccatggctggcagacacgtggcctaatactggcaacaaccacaatgactgctccatcagctgctgcacggcaggcaatggaaacagcgacagcaacctcactacctacagtcgcccagctgattgtatagcaaattataacaaccaactggataacaaacaaacaaatctgatgctccctgagtcaactgtttatggtgatgtggaccttagtaacaaaatcaatgagatgaaaaccttcaatagcccaaatctgaaggatgggcgttttgtcaatccatcagggcagcctactccttacgccaccactcagctcatccagtcaaacctcagcaacaacatgaacaatggcagcggggactctggcgagaagcactggaaaccactgggacagcagaaacaagaagtggcaccagttcagtacaacatcgtggagcaaaacaagctgaacaaagattatcgagcaaatgacacagttcctccaactatcccatacaaccaatcatacgaccagaacacaggaggatcctacaacagctcagaccggggcagtagtacatctgggagtcaggggcacaagaaaggggcaagaacacccaaggtaccaaaacagggtggcatgaactgggcagacctgcttcctcctcccccagcacatcctcctccacacagcaatagcgaagagtacaacatttctgtagatgaaagctatgaccaagaaatgccatgtcccgtgccaccagcaaggatgtatttgcaacaagatgaattagaagaggaggaagatgaacgaggccccactccccctgttcggggagcagcttcttctccagctgccgtgtcctatagccatcagtccactgccactctgactccctccccacaggaagaactccagcccatgttacaggattgtccagaggagactggccacatgcagcaccagcccgacaggagacggcagcctgtgagtcctcctccancaccacggccgatctcccctccacatacctatggctacatttcaggacccctggtctcagatatggatacggatgcgccagaagaggaagaagacgaagccgacatggaggtagccaagatgcaaaccngaaggcttttgttacgtgggcttgagcagacacctgcctccagtgttggggacctggagagctctgtcacggggtccatgatcaacggctggggctcagcctcagaggaggacaacatttccagcggacgctccagtgttagttcttcggacggctcctttttcactgatgctgactttgcccaggcagtcgcagcagcggcagagtatgctggtctgaaagtagcacgacggcaaatgcaggatgctgctggccgtcgacattttcatgcgtctcagtgccctaggcccacaagtcccgtgtctacagacagcaacatgagtgccgccgtaatgcagaaaaccagaccagccaagaaactgaaacaccagccaggacatctgcgcagagaaacctacacagatgatcttccaccacctcctgtgccgccacctgctataaagtcacctactgcccaatccaagacacagctggaagtacgacctgtagtggtgccaaaactcccttctatggatgcaagaacagacagatcatcagacagaaaaggaagcagttacaaggggagagaagtgttggatggaagacaggttgttgacatgcgaacaaatccaggtgatcccagagaagcacaggaacagcaaaatgacgggaaaggacgtggaaacaaggcagcaaaacgagaccttccaccagcaaagactcatctcatccaagaggatattctaccttattgtagacctacttttccaacatcaaataatcccagagatcccagttcctcaagctcaatgtcatcaagaggatcaggaagcagacaaagagaacaagcaaatgtaggtcgaagaaatattgcagaaatgcaggtacttggaggatatgaaagaggagaagataataatgaagaattagaggaaacntgaaagctgaagacaaccaagaggcttatgagatctaatgtgaaaatcatcactcaagatgcctcctgtcagatgacacatgacgccagataaaatgttcagtgcaatcagagtgtacaaattgtcgtttttatncctcttattgggatatcattttaaaaactttattgggtttttattgttgttgtttgatccctaaccctacaaagagccttcctattcccctcgctgttggagcaaaccattataccttacttccagcaagcaaagtgctttgacttcttgcttcagtcatcagccagcaagagggaacaaaactgttcttttgcattttgccgctgagatatggcattgcactgcttatatgccaagctaatttatagcaagatattgatcaaatatagaaagttgatattcaacctcacaagggctctcaaagtataatctttctatagccaactgctaatgcaaattaaaacatatttcattttaacatgatttcaaaatcagtttttcatactaccctttgctggaagaaactaaaaatatagcaaatgcagaaccacaaacaattcgaatggggtagaaacattgtaaatatttactctttgcaaaccctggtggtattttattttggcttcatttcaatcattgaagtatattcttattggaaatgtacttttggataagtagggctaagccagttggatctctggttgtctagtcattgtcataagtaaacctagtaaaaccttgttctatttttcaatcatcaaaaagtaattataaatacgtattacaaacaagtggatgtttttaatgaccaattgagtaagaacatccctgtcttaactggccntaaattncttctggtagtgtcagttcaactttcagaagtgccacttaaggaagtttgatttttnnttttgtaangcacngnttttaanctctctctcntttttttttttttttnggttttaaaagcacaatcactaaactttatttgtaaaccattgtaactattaaccttttttgtcttattgaaaaaaaaantgttgagaagcgtttttaacctgttttgttaatgctctatgtttgtatttggaatatttgaataatgacagatggtgaagtaacatgcatactttattgtgggccatgaaccaaatggttcttacttttcctggacttaaagaaaaaaagaggtttaagtttgttgtggccaatgtcgaaacctacaagatttccttaaaatctctaatagaggcattacttgctttcaattgacaaatgatgccctctgactagtagatttctatgatccttttttgtcattttatgaatatcattgattttataattggtgctatttgaagaaaaaaatgtacatttattcatagatagataagtatcaggtctgaccccagtggaaaacaaagccaaacaaaactgaaccacaaaaaaaaaggctggtgttcaccaaaaccaaacttgttcatttagataatttgaaaaagttccatagaaaaggcgtgcagtactaagggaacaatccatgtgattaatgttttcattatgttcatgtaagaagccccttatttttagccataattttgcatactgaaaatccaataatcagaaaagtaattttgtcacattatttattaaaaatgttctcaaatacaaannnaaaaaaaaaaaaaaaaaaaaaaaaaaaaaaaaaaaaaaaaaaaaaaaaaa

SEQ ID NO: 200 - DNA, 1009 bp, Homo sapiens
  modified_base (5)..(5): a, c, g, t, unknown, or other
  modified_base (141)..(144): a, c, g, t, unknown, or other
  modified_base (146)..(152): a, c, g, t, unknown, or other
  modified_base (989)..(992): a, c, g, t, unknown, or other
tgctngaatggaatctaatgcctcatgatctgaggttgaatagcttcgtgccgaaaccatcccccacccccatcccgctaccccgagtccgtgaaaaaattgtcttccatgaagccggtccctggtaccagaaaggttggnnnncnnnnnnntaaaataccaataaatttttgaaccttaaaaactttgaagaacaaggtaaattggtgttttatttaatgtcctaccctttaatttgttgcattttcctatactctttacactattttatcccaaactatgtatatgaggtgaaaatatatatgaaaagggatactgaagaatatttagtttaaaattaatttcttacgatcacgagcacatggtggcataattacaaagcttggaagtattcaaatagaaaatcaaaggtgtttcaatacagtagaatcccaggactgcattttaaaatcgcctcacagatcacactcgctggtggcaaatatcatcatcgttgctaaaggacagaaaatactgatgtgtgttttaactaactggtatattgatccatgggaggctgcacagaagaccctgcggccaggaggggcattgtcagtggctgcttctcctgagctccacgccttcattgcagctgcatgttcgatacaatacacctgcttcacagccccatggacatccctacaggtactgtcatgtgaagccttgcctagtagttctctccagggcaaatgaagctcacagttttgcaaggtggaaacctcttattcacatttgctttgattccccgatggagtagactgcctttgttccatacaggcaaagtaaggatattttaatatcatcctacttcttattagcatttcatttgtctatgtactgtatttcatttgtatgtctcctgaaacatccaaatagagaacataagaacactttatgtacaatctggaaaaaaattacctgagaaatcaattaaagatttttcccctttnnnnaaaaaaaaaaaaaaaaa

SEQ ID NO: 201 - DNA, 1565 bp, Homo sapiens
  modified_base (372)..(375): a, c, g, t, unknown, or other
  modified_base (378)..(378): a, c, g, t, unknown, or other
  modified_base (513)..(513): a, c, g, t, unknown, or other
  modified_base (551)..(551): a, c, g, t, unknown, or other
  modified_base (1155)..(1155): a, c, g, t, unknown, or other
cactgttaagacctcctattgagttttccaggtcctcagatgggaattgcacagtaggatgtggaacctgtttaatgttatgaggacgtgtctgttatttcctaatcaaaaaggtctcaccacataccatgtggatgcagcacctctcaggattgctaggagctcccctgtttgcatgagaaaagtagtcccccaaattaacatcagtgtctgtttcagaatctctctactcagatgaccccagaaactgaaccaacagaagcagacttttcagaagatggtgaagacagaaacccagtaacttgcaaaaagtagacttggtgtgaagactcacttctcagctgaaattatatatatacacatatatatatnnnnttnacatctgggatcatgatagacttgttagggcttcaaggccctcagagatgatcagtccaactgaacgaccttacaaatgaggaaaccaagataaatgagctgccagaatcaggtttccaatcaacagcagtgagntgggattggacagtagaatttcaatgtccagtgagtgnggttcttgtaccacttcatcaaaatcatggatcttggctgggtgcggtgcctcatgcctgtaatcctagcactttgggaggctgaggcaggcaatcacttgaggtcaggagttcgagaccagcctggccatcatggcgaaacctcatctctactaaaaatacaaaagttaaccaggtgtgtggtgcacgtttgtaatcccagttactcaggaggctgaggcacaagaattgagtatcactttaactcaggaggcagaggttgcagtgagccgagattgcaccactgcactccagcttgggtgataaaataaaataaaatagtcgtgaatcttgttcaaaatgcagattcctcagattcaataatgagagctcagactgggaacagggcccaggaatctgtgtggtacaaacctgcatggtgtttatgcacacagagatttgagaaccattgttctgaatgctgcttccatttgacaaagtgccgtgataatttttgaaaagagaagcaaacaatggtgtctcttttatgttcagcttataatgaaatctgtttgttgacttattaggactttgaattatttctttattaaccctctgagttttngtatgtattattattaaagaaaaatgcaatcaggattttaaacatgtaaatacaaattttgtataacttttgatgacttcagtgaaattttcaggtagtctgagtaatagattgttttgccacttagaatagcatttgccacttagtattttaaaaaataattgttggagtatttattgtcagttttgttcacttgttatctaatacaaaattataaagccttcagagggtttggaccacatctctttggaaaatagtttgcaacatatttaagagatacttgatgccaaaatgactttatacaacgattgtatttgtgacttttaaaaataattattttattgtgtaattgatttataaataacaaaattttttttacaacttaaaaaaaaaaaaaaaaaaaaaaaaaa

SEQ ID NO: 202 - DNA, 829 bp, Homo sapiens
  modified_base (100)..(100): a, c, g, t, unknown, or other
  modified_base (102)..(102): a, c, g, t, unknown, or other
  modified_base (104)..(104): a, c, g, t, unknown, or other
  modified_base (604)..(604): a, c, g, t, unknown, or other
  modified_base (694)..(696): a, c, g, t, unknown, or other
  modified_base (741)..(741): a, c, g, t, unknown, or other
  modified_base (764)..(764): a, c, g, t, unknown, or other
  modified_base (768)..(768): a, c, g, t, unknown, or other
aggtcctttgtgtttcgacagtatttattaatgcagatatcagtgctacagctataaaatataccctgagcagcttgttaattctataaatgacaaagantntntttttaaaaagtcacaattttataaaaatggtttttcttacattcttttgagaactgtttcactcatacatacacccacacaccccactcaaccttgtatcaaattccaaaagtgtaactaaagtataagaatatcatgactagttaaaagatagcaaataccataaggtacaagttcaagtattagtataacaagtatctgagtaacaaatgtccttggaaatggggggtaggaggagatatgattagtcacaggtttggttaactgccctcaaaatttacaagttaaaatgttttggctggtgagcacatttcagttcttaggggaaaaaaagcttttaatggcaatttatagaaatcagaatccaggctaatgatttttatccttcacacagtaaatgcagcccatccagaatcctggagcaataaagtaagaagtaattcaaatatctgcttgtgggtcaataaaaagggtttctgaagtatcaagtcttgtgggnacagcccccaaccctaagggcaggtagtattctatctcctggctggctcatcacattcaaaacaacctgttttttttgttgttgttgttnnngttaagaaatatctcaccctcttattcaatagtgtttgaaaacanggcaatctttgtattttaaatantctnggtttgtagatagtgaattttttttttttttttttttttttttgaggcagagtctcactct

SEQ ID NO: 203 - DNA, 1844 bp, Homo sapiens
  modified_base (13)..(15): a, c, g, t, unknown, or other
  modified_base (51)..(51): a, c, g, t, unknown, or other
  modified_base (58)..(58): a, c, g, t, unknown, or other
  modified_base (60)..(61): a, c, g, t, unknown, or other
  modified_base (63)..(63): a, c, g, t, unknown, or other
  modified_base (72)..(74): a, c, g, t, unknown, or other
  modified_base (78)..(78): a, c, g, t, unknown, or other
  modified_base (87)..(90): a, c, g, t, unknown, or other
  modified_base (93)..(93): a, c, g, t, unknown, or other
  modified_base (95)..(95): a, c, g, t, unknown, or other
  modified_base (390)..(390): a, c, g, t, unknown, or other
  modified_base (415)..(415): a, c, g, t, unknown, or other
  modified_base (1024)..(1025): a, c, g, t, unknown, or other
  modified_base (1035)..(1036): a, c, g, t, unknown, or other
  modified_base (1039)..(1039): a, c, g, t, unknown, or other
  modified_base (1048)..(1050): a, c, g, t, unknown, or other
  modified_base (1054)..(1055): a, c, g, t, unknown, or other
  modified_base (1293)..(1293): a, c, g, t, unknown, or other
  modified_base (1320)..(1320): a, c, g, t, unknown, or other
  modified_base (1326)..(1326): a, c, g, t, unknown, or other
  modified_base (1372)..(1372): a, c, g, t, unknown, or other
  modified_base (1380)..(1380): a, c, g, t, unknown, or other
  modified_base (1386)..(1386): a, c, g, t, unknown, or other
  modified_base (1466)..(1466): a, c, g, t, unknown, or other
tggagcctggcgnnnagtgggggcgtgcgacggttactctggttactgggnccgcgcngnncntggcgagannngccngcccgcgannnntgncntggtgaggaagccgtcgggagccgccgccgccatctgagggaggtaccctggaaaccaccttttatcggtggggaagtgcagtcgcggtgggcggctctgggggccagcgaaacgggaggcctctaaatctttaggttggggctgcattgccctggagccgcactcttgagtccgaggccatcttttgttggagaaggcgtcggcgttggcgttttcccgaggttgggctgtacagtgtctccgtccgcggaaaaagaagcctctgaacccgcgccggcccgcagcccccgtgcnttccggccgctgctcgccgtcgccnagaggctaggccacgtttcccccagtgccgaggtgtttctgtgaccctccctccactcccattcccttctgaaagggcacctgctcttggtgagaaaagaaattatagcacgaagagccagtatcagaagagtatccatcacccgcagcaaccgctcagggaacaccatcaaaaaagaaaaaaagggaatatctggatttcctgggcgaggaggagcgagtctgctcgggagctgttccagcaggcgatttttaaatactgctttctacgccctatacaacttggcttcacatacttttacactaactttatatgatttttaaaaactggtctgatcggacttctcgtcctgggacactgtttactggagtctggccggctctccgtgctcctcttggtacctcattttggggagaaccttaaacccactcgagcagataatctccgccttgaccggtgccaccaaagaagccttggaaccatgtggacttttctgggcattgccactttcacctatttttataagaagttcggggacttcatcactttggccaacagggaggtcctgttgtgcgtgctggtgttcctctcgctgggcctggtgctctnnctaccgctgnncgncaccgaaannngggnntcctcgggcgccagcagagcggctcccagttcgccctcttctcggatattctctcaggcctgcctttcattggcttcttctgggccaaatccccccctgaatcagaaaataaggagcagctcgaggccaggaggcgcagaaaaggaaccaatatttcagaaacaagcttaataggaacagctgcctgtacatcaacatcttctcagaatgacccagaagttatcatcgtgggagctgncgtgcttggctctgctttggcagctgngctttncagagatggaagaaaggtgacagtcattgagagagacttaaaagangcctgacngaatanttggagaattcctgcagccgggtggttatcatgttctcaaagaccttggtcttggagatacagtggaaggtcttgatgcncaggttgtaaatggttacatgattcatgatcaggaaagcaaatcagaggttcagattccttaccctctgtcagaaaacaatcaagtgcagagtggaagagctttccatcacggaagattcatcatgagtctccggaaagcagctatggcagagcccaatgcaaagtttattgaaggtgttgtgttacagttattagaggaagatgatgttgtgatgggagttcagtacaaggataaagagacctccaagttcaggaaaagcctggtctccaataaagtttctgtatcatctcattttgttggctttcttatgaagaatgcaccacagtttaaagcaaatcatgctgaacttattttagctaacccgagacgagttctc

SEQ ID NO: 204 - DNA, 521 bp, Homo sapiens
  modified_base (148)..(148): a, c, g, t, unknown, or other
  modified_base (156)..(156): a, c, g, t, unknown, or other
  modified_base (159)..(159): a, c, g, t, unknown, or other
  modified_base (161)..(161): a, c, g, t, unknown, or other
  modified_base (165)..(165): a, c, g, t, unknown, or other
  modified_base (167)..(168): a, c, g, t, unknown, or other
  modified_base (172)..(173): a, c, g, t, unknown, or other
  modified_base (175)..(175): a, c, g, t, unknown, or other
  modified_base (283)..(283): a, c, g, t, unknown, or other
  modified_base (437)..(438): a, c, g, t, unknown, or other
  modified_base (494)..(494): a, c, g, t, unknown, or other
tttttttttgggtttccccaccccctcaatctgtcggggagcccctgcccttcacctagctcccttggccaggagcgagcgaagctgtggccttggtgaagctgccctcctcttctcccctcacactacagccctggtgggggagaanggggtggntgntncttntnntttnntnttttttttttttttttttttaattcaatctggaatcagaaagcggtggattctggcaaatggtccttgtgccctccccactcatccctggtctggtcccctgttgccnatagccctttaccctgagcaccaccccaacagactggggaccagccccctcgcctgcctgtgtctctccccaaacccctttagatggggagggaagaggaggagaggggaggggacctgccccctcctcaggcatctgggagggccctgccccnntgggctttacccttccctgcgggctctctccccgacacatttgttaaaatcaaacnctgaataaaactacaagtttaatatga

SEQ ID NO: 205 - DNA, 5187 bp, Homo sapiens
  modified_base (64)..(64): a, c, g, t, unknown, or other
  modified_base (66)..(66): a, c, g, t, unknown, or other
  modified_base (69)..(71): a, c, g, t, unknown, or other
  modified_base (74)..(74): a, c, g, t, unknown, or other
  modified_base (89)..(89): a, c, g, t, unknown, or other
  modified_base (522)..(522): a, c, g, t, unknown, or other
  modified_base (597)..(597): a, c, g, t, unknown, or other
  modified_base (668)..(669): a, c, g, t, unknown, or other
  modified_base (741)..(741): a, c, g, t, unknown, or other
  modified_base (920)..(920): a, c, g, t, unknown, or other
  modified_base (1112)..(1114): a, c, g, t, unknown, or other
  modified_base (1339)..(1339): a, c, g, t, unknown, or other
  modified_base (1458)..(1459): a, c, g, t, unknown, or other
  modified_base (1462)..(1464): a, c, g, t, unknown, or other
  modified_base (1591)..(1591): a, c, g, t, unknown, or other
  modified_base (2547)..(2547): a, c, g, t, unknown, or other
  modified_base (2554)..(2554): a, c, g, t, unknown, or other
  modified_base (2648)..(2648): a, c, g, t, unknown, or other
  modified_base (2795)..(2795): a, c, g, t, unknown, or other
  modified_base (2848)..(2849): a, c, g, t, unknown, or other
  modified_base (2851)..(2852): a, c, g, t, unknown, or other
  modified_base (3716)..(3716): a, c, g, t, unknown, or other
  modified_base (3728)..(3728): a, c, g, t, unknown, or other
  modified_base (3733)..(3733): a, c, g, t, unknown, or other
  modified_base (3873)..(3873): a, c, g, t, unknown, or other
  modified_base (4021)..(4021): a, c, g, t, unknown, or other
  modified_base (5115)..(5115): a, c, g, t, unknown, or other
  modified_base (5122)..(5123): a, c, g, t, unknown, or other
  modified_base (5125)..(5125): a, c, g, t, unknown, or other
  modified_base (5128)..(5129): a, c, g, t, unknown, or other
ttaaatatggtacaaatatattctcaaaactctgtcatctcagttctttttttttttccttttncnatnnngtnttttctttctttttnttttttttttttttaatgtcctagcttggtttggtcttgaaaagattcataatcactccaaatgaaatgctcctcccttggccaccaatgtgaagggagggtagaaacctgaggctagacttctgacacaagaagaatctgtcgagagcacagtctcccagtcaataagaaggaaggagagagggggatgagctcgcacccttgagaagaaccttcatgagccaattcccaaagcatcaactccgcatggatactttgcacacacatcagccgtgtctaatggacacacacacgtgcatacacacgtgagcacacgccgggaccacagacccttatccaaaatatgaaagcagcagctattggtcaatttgaggaactcattttgtaaagaaaaaaaaaatccttcagcctggatgagagaaaaaaaaaaaanccaaaaaaaccatcttgaagctcaacctgtaaaacttgaaattctcctggaacagggctgggtgtttttgttttnttttttctttcgaacttttgttccacaaacaggaagttttgtcttttatactgaagctcagacaccagcannaaaaaaaaaaaaaaaaaaaagaatttgtaaaaacaggtgctttctttccatctgctgggggcgggtgggggnaacgaaaaaacacaaaatcctggtttgaaaccgtcgttgccccaaaggagcagcaactgtggaaaccccttgccctccaggttcacagttaaatcctctgcaggactagttaaattggtaaccaaacgagtccaccttaagatgaacagaaatgtataggaacgatctctgaactccantggacatggtagagtcgtgagaatcctgagttttccagaggctttcaaaccagaggaaagcgaaaatgggaacccctgcccgcccccgccacggtaggcactgttaggaaggattggaccgaggcaaggtcagaatccgcccgtttttcttgcctccgttcatgtgtgtgtaagggatgtgttcctcgtagnnncgcttgaaacccagcgaggaccctccatcccggccccccgcctcctccctctgacagtgcgaggaacggtccaggggcacattctccatgtcctcaaactccatctccagctcctcactctcgggagccttgttctcctcgctgtggaagaacgacacctctggaaagctggggtgcaggtcgtccttgagcaggttgacaatctccaggaaggttggcctcatnttggggttgaattgccagcacatgcgcatgaggtcagtgactctctctggacagttgtcgggttgatccagataccctccatccatgacaaatttcaacacctgttcattagacaggcnntgnnnaggctgttctgccaagctggtgatttcccaaaggaccacgccaaaggaccacatgtcagaagaagtggtgaagaccccatccttcagggactccggtgccatccaccgtacagggagcagacccttnccccctttccggtagtaatccgtttcatagatgtctctggtcattccaaagtctccaattttgacagtaaaatcatgggcgaccatgcagtttctcgctgccaggtcccgatgcacaaacttcttggcgttcaggtaggccatcccgtcagcaatctctgccgccatctgaatcatctcttgaagggtagggggagggcggccaggattattctcagcctctggccgcagagaacggaggtagctcttcaggtctccgtgagccatcagctccatcaccaccagcgtgggctggcccttggacaccactcccaggaggcgcaccacgtgatggcaggtgaagcccttcatgaccgaggcctcattgaggaactcaatccgctctcggagactggctgactcgttgaccgtcttcaccgccacgcgggtctctgcctcacccttgatgatgtccctggcattgccctcatacaccatgccgaaggagccctgccccagctctcgaaggagggtgatcttctctcgagacacctcccactcgtccggcacgtacacagagcatggaaacacatcactggcactgagatactcagggtttgaagaagcgtaaagcggtcccagcggcccatctggctgcctctttctcaggaatagataaatacttccaatcacaacactgaagagaaagacaaagatgagggggccgatgataatttttgcaatatttgacgggacgtctaaatagtctgtcacgtagaaataggtgggttccgtccaagagccgttgcccgcaagggaggtggcccggattcgcacgctgtagttccccggtgacagcccacgcagcctgcagccccgttccagagcgaagtgcttgcgggagacgcagagatgcagctcctcatcaccatatcgccgataactcacttcatacagcacgatcagaccattgggctncttcggntcctgccacatcaagtggacgacgttgttctcaaagatttcatgcgtcacagggccaacaatgtcatcagccttggcttcaggcatggtcctcngcactgacgtaggctgccacactgcaccgttcctcaggggtgtcctggttgcaagcctgcagctcgatgcgatagcccgtgaagtgtcgcaagccggagatgaccagcgactccttgttcaccaccttctcaaaaggcctgtgctcntccggactcgtgggcacgctggtcgaggaagtgttggggaaagctgccaccgnngnnacggccaccgtcacattcccaacatcgccaagggacctgcgtttccgagatggcctggggacgaaaaccacgttgtgcaggtaatcctcaaacgtcttcctaaacgaggactcctccagctccttcaggatctgagagtctgtctttggacaggagcagcattcgccggccgaatcctcatactcactctggttgtgcttctgagaatcttcagactcgaatggtggagaccaggtcctcgagggcagcttcagccctttgaggcaataatccagctcgaacagctcactgtcttccgcctgcctctcccagaaaaccaggtagtgggtgatgttgccattggggtcggagggtggtttccacttcagaataatctgggatgatgagttagacactgagattggatccaggggcacagaggggttggtggcatctgtctggacataaatgatgtcactcttggccccataggtccggcgttcatccgaaaaggtgaccagggtcttcacaaagatggcatactgggtccagggcttgagaccccgcatcagccaccctgggtggttctgtgatttggggtcgttggacctcaggggtgggtcaatgtctaccaccgtccaactgttggaaccacatgcatcctgcccgtcgaactccgtcacattctgataaggggcctctttgtagaacagcatgaaccccaagaggtctcggaagtcggggggccagtacggctcccatctcagcaagatcttgtcaaaagatgtccgaatgtaagaaaatttaagtaactcattttcacaggatgcctggtccccattggtcttcagggcaatgtcgtttctctcctggcgccccttggtncctgaaacttcnttccnatcttgtggatttctgacaagcagagtttggggttatagtggaagaagagtttcccctgagtgatggtgaggttgtgtttgctccagtcccagagctgccttaggttctggttgtccaaggcatagaaggagtagttccnaatttccaaggtctctcctcgaatcagacgtaacttccggaagaaggaaagtgacaccagagcgtaggatcggcggatttttagataccctgaaatttcttcaatgaggccgaggttggcttctagctcagctgccagattgttgccncctcgaatgttgatgatcagactcccgttgatgacggtgcatcctcggagctcctgggcagacgtcaccgagtcgatggtcttctcgccttctaggaggtggcacaccttgggacagggacccaggcatggggtgcacagcaagttgctggaattcatcgtgtacccggagggacactcagggatgcacttgttgttgtgaatgacgtactggtggcagccctgcctccgcgagttcttgcatttgtggtgcaggtcctggcagaagctgaagttcacacagcgccagtcctggaagtggtagtacgggggcgggcaggtctccacacacctgccgtccaggtagaagttgcggcaggccacgcacttggtggggtcgtcgggctgagaacagttgcccaggcactcgctgtggcaacagaggccttcggcggtgcagccgtgtgacttacagatggtcgggcaaactttctggcagtgactatgagtccaacatcgttcgacaaactgcccgttgatgacggtggcggggcagttggtcttgcccttcgcggtacccggacagatgtctccacactcctcgttgtcatctttgttcaacacgatgtaattatcctccacggaatccaggatacgggaccagtcgatagtggccaagtaacagagctcattgttcttctcgatgcggacagaaccccgggtgatgttcatcaggttgtagaggccgagttccttgaggtgaaccatctcgaagatgaccagcgcgtagttaaagaacagtcgtgatccccggatgaccgtgaggttggggaacaggtccttcaggctctcgagcccatagacccggaagagcagcaagtaatcagtgatcatgatgagtttggggaaactgaggtctcggaaatcttcgggcctcgttttgaacatcaagagtatctgcaagtgtccttcgatgacagagcaattctccagctcatgcaacctagtgaggttgttccggatatccatgccgggacacacctctccggggtacaggtggcccgcggcgcccagtagcagcgcggccaccgccaccagcagcggcgcggccgccgncccccgnngnccnncggtgcccatggctgcgggagcgcggggtctcctcggatcagagcgcgcgctcccggt

SEQ ID NO: 206 - DNA, 680 bp, Homo sapiens
  modified_base (45)..(45): a, c, g, t, unknown, or other
  modified_base (123)..(123): a, c, g, t, unknown, or other
  modified_base (217)..(217): a, c, g, t, unknown, or other
  modified_base (384)..(384): a, c, g, t, unknown, or other
  modified_base (398)..(398): a, c, g, t, unknown, or other
  modified_base (659)..(659): a, c, g, t, unknown, or other
gggaagcgcgcgtggccgccatggcgcggaatgtggtgtaccccntgtaccggctgggtggcccacaacttcgggtgttccgaaccaacttcttcattcagctggtgcggcccggtgtggccnagcccgaggacaccgtgcagttccggatccccatggaaatgacaagggtggacctcaggaattacctcgagggcatctataacgtgcccgtggntgctgtgcggacacgggtgcagcatggctctaacaagagaagagatcacagaaacgtgaggatcaagaagccggactacaaggtcgcctacgtgcagctggcccatggacagaccttcacgttcccagatctgtttcccgagaaagacgagagccctgaaggcagcnctgccgacgacctntacagcatgctcgaggaggagaggcagcagaggcagagcagcgacccgcggcggggcggcgtccccagctggttcgggctgtgacggggtggccagcagggacgcgccccaggtgggcagctgtggcagagcagcgacccgcggcggggcggcatccccagctggttcgggccgtgacggggcggccagcagggacgcgccccaggtgggcagctgtggcagagcagtcccgacacctaaataaaagtcttgctgcagganaaaaaaaaaaaaaaaaaaaaa

SEQ ID NO: 207 - DNA, 566 bp, Homo sapiens
  modified_base (406)..(412): a, c, g, t, unknown, or other
  modified_base (414)..(429): a, c, g, t, unknown, or other
  modified_base (433)..(435): a, c, g, t, unknown, or other
  modified_base (522)..(526): a, c, g, t, unknown, or other
ctctcggtgactactatcgctgtcatgtctggtcgtggcaagcaaggaggcaaggccgcgccaaggcaagtcgcgctcgtccggctggccttcattccggagcgagtgcatcgttgctgcgaaaggcaactacgcgggcagtgggggccggcgcccgtctacatggctgcggtcctcgagtatctgaccgccgagatcctggagctggcgggcaacgcggctcgggacaacaagaagacgcgcatcatccctcgtcacctccagctggccatccgcaacgacgaggaactgaacaagctgctgggcaaagtcaccatcgcccaggggcgcgtcttgcctaacatccaggccgtactgctccctaagaagacggagagtcaccacaaggcaaagggcaagtgaggcnnnnnnncnnnnnnnnnnnnnnnncggnnncgagaagacgacagaaggggcacctgtgaactcaaaaggctcttttcagagccacccacgttttcaaataaaagagttgttaatgcnnnnnaaaaaaaaaaaaaaaaaaaaaaaaaaagtcgtatcgatgt

SEQ ID NO: 208 - DNA, 153 bp, Homo sapiens; identical to SEQ ID NO: 46
  modified_base (2)..(5): a, c, g, t, unknown, or other
  modified_base (11)..(11): a, c, g, t, unknown, or other
  modified_base (137)..(138): a, c, g, t, unknown, or other

SEQ ID NO: 209 - DNA, 153 bp, Homo sapiens; identical to SEQ ID NO: 46
  modified_base (2)..(5): a, c, g, t, unknown, or other
  modified_base (11)..(11): a, c, g, t, unknown, or other
  modified_base (137)..(138): a, c, g, t, unknown, or other

SEQ ID NO: 210 - DNA, 3135 bp, Homo sapiens
  modified_base (622)..(623): a, c, g, t, unknown, or other
  modified_base (625)..(631): a, c, g, t, unknown, or other
  modified_base (634)..(634): a, c, g, t, unknown, or other
  modified_base (637)..(637): a, c, g, t, unknown, or other
  modified_base (639)..(639): a, c, g, t, unknown, or other
  modified_base (642)..(642): a, c, g, t, unknown, or other
  modified_base (646)..(646): a, c, g, t, unknown, or other
  modified_base (651)..(651): a, c, g, t, unknown, or other
  modified_base (657)..(658): a, c, g, t, unknown, or other
  modified_base (662)..(663): a, c, g, t, unknown, or other
  modified_base (676)..(676): a, c, g, t, unknown, or other
  modified_base (678)..(678): a, c, g, t, unknown, or other
  modified_base (680)..(680): a, c, g, t, unknown, or other
  modified_base (686)..(686): a, c, g, t, unknown, or other
  modified_base (689)..(690): a, c, g, t, unknown, or other
  modified_base (695)..(695): a, c, g, t, unknown, or other
  modified_base (698)..(698): a, c, g, t, unknown, or other
  modified_base (701)..(701): a, c, g, t, unknown, or other
  modified_base (704)..(704): a, c, g, t, unknown, or other
  modified_base (725)..(727): a, c, g, t, unknown, or other
  modified_base (730)..(731): a, c, g, t, unknown, or other
  modified_base (740)..(740): a, c, g, t, unknown, or other
  modified_base (747)..(747): a, c, g, t, unknown, or other
  modified_base (798)..(798): a, c, g, t, unknown, or other
  modified_base (829)..(829): a, c, g, t, unknown, or other
  modified_base (836)..(836): a, c, g, t, unknown, or other
  modified_base (838)..(838): a, c, g, t, unknown, or other
  modified_base (893)..(893): a, c, g, t, unknown, or other
  modified_base (952)..(952): a, c, g, t, unknown, or other
  modified_base (968)..(968): a, c, g, t, unknown, or other
  modified_base (1004)..(1004): a, c, g, t, unknown, or other
  modified_base (1053)..(1053): a, c, g, t, unknown, or other
  modified_base (1072)..(1072): a, c, g, t, unknown, or other
  modified_base (1084)..(1084): a, c, g, t, unknown, or other
  modified_base (1092)..(1092): a, c, g, t, unknown, or other
  modified_base (1198)..(1198): a, c, g, t, unknown, or other
  modified_base (1253)..(1253): a, c, g, t, unknown, or other
  modified_base (1765)..(1765): a, c, g, t, unknown, or other
  modified_base (1782)..(1782): a, c, g, t, unknown, or other
  modified_base (1806)..(1806): a, c, g, t, unknown, or other
  modified_base (1811)..(1811): a, c, g, t, unknown, or other
  modified_base (1859)..(1859): a, c, g, t, unknown, or other
  modified_base (2055)..(2055): a, c, g, t, unknown, or other
  modified_base (2175)..(2175): a, c, g, t, unknown, or other
  modified_base (2178)..(2179): a, c, g, t, unknown, or other
  modified_base (2181)..(2182): a, c, g, t, unknown, or other
  modified_base (2187)..(2187): a, c, g, t, unknown, or other
  modified_base (2190)..(2191): a, c, g, t, unknown, or other
  modified_base (2193)..(2193): a, c, g, t, unknown, or other
  modified_base (2195)..(2195): a, c, g, t, unknown, or other
  modified_base (2197)..(2197): a, c, g, t, unknown, or other
  modified_base (2262)..(2262): a, c, g, t, unknown, or other
  modified_base (2264)..(2264): a, c, g, t, unknown, or other
  modified_base (2300)..(2300): a, c, g, t, unknown, or other
  modified_base (2336)..(2337): a, c, g, t, unknown, or other
  modified_base (2339)..(2339): a, c, g, t, unknown, or other
  modified_base (2354)..(2354): a, c, g, t, unknown, or other
  modified_base (2362)..(2362): a, c, g, t, unknown, or other
  modified_base (2378)..(2378): a, c, g, t, unknown, or other
  modified_base (2387)..(2387): a, c, g, t, unknown, or other
  modified_base (2391)..(2391): a, c, g, t, unknown, or other
  modified_base (2414)..(2414): a, c, g, t, unknown, or other
  modified_base (2425)..(2425): a, c, g, t, unknown, or other
  modified_base (2428)..(2428): a, c, g, t, unknown, or other
  modified_base (2432)..(2432): a, c, g, t, unknown, or other
  modified_base (2438)..(2438): a, c, g, t, unknown, or other
  modified_base (2442)..(2443): a, c, g, t, unknown, or other
  modified_base (2457)..(2457): a, c, g, t, unknown, or other
  modified_base (2459)..(2459): a, c, g, t, unknown, or other
  modified_base (2461)..(2467): a, c, g, t, unknown, or other
  modified_base (2469)..(2469): a, c, g, t, unknown, or other
  modified_base (2474)..(2477): a, c, g, t, unknown, or other
  modified_base (2480)..(2486): a, c, g, t, unknown, or other
tatttccatgcaagtggaagacggtaccgtctccccacatttgagaagactgttttgcatcactctttgctattgaaggaagcagtgatggtgaatttccttctgtttgggttccttgtgtctataacttcctttgtggtaaagccatcaggaagaatagtgggagtggggtatatggtcagggtgctcatatcctgctttagcctagctgcttcttacggagtgcaagggagaactctgagaagcagtatgtaaataccagggagctgattgctgaatattgtggtctcatctgaatattgtggtctcatctaaatattgacaccaggcaatgaagcagaaatagagtatgtgtccctttatgcgtgggtaacttaagcttctgtcatgtgggaagggggaccgaatcttccctgggaggaaggctccaaattctcactacttctgtgttacttgaagggggaagcataaggaacccagtttgaaggcaacattgtgtgccatgaatctgcttattaatcaacatgccttgttaatgtcctctgccctgaacagcccttactcagttctcatttggaaagttattttttggggttacatcctgtttgtttcagaatttaanncnnnnnnnggnggntnacntgangtcangagttnnagannagcctggccaacntngngaaacnccnnctctnctnaanatncaaaaattagccaggtgtggnnncanncgcctgtantcccagntacttgggaggccgaggcaggagaatcgcttgaacctgggaggcagaggtngtagcgagccaagatcacaccattgcactcnagcctgngncaacagagtgagactctgtcaaaatcaaaaaaaccaaaatacaaaaaactccatngttctgagagtttcccctaaattatcggaagacactcacattgaattggtaggacctantagtatagaggagaantggtatgtatgtcagcagtagagttccaatccaaantgcgctatcgcattagaaatacattaccctcccactccccaagttcagnaaattagaagagaatctgnagtttgtaggangggaatanagctgctataaacatttatgtgcaggtttttgtgtagactcgttttcagctcctttgggtaaataccaaggaaccaggttgctggattgtaagttaagagtatgtntagttttggaagaaactgccaaactgttccaacatgactattttgaattcccatngacaatgaataagagttcctgtagctcctcaccctcattagtatttggtgatgtcactcttgcattttagctaatgggtgaatagtggtctcatcgttttaattcccaatcccatagtgatgtggagcaccttttcatatacttaatctgccatccttatatcatcattggtgaggtgtctggattttctgtccagaattttagttctagtggttttcttatttttagaaaggaagtataggaaggaaggtttaatctgtcttaagcctgattatatgaaaatcaagaataggctaggtgtggtggctgacatctgtaatccccgcactttgtgaggctgaagtgggaggactgcttgagcctgggaagtcaagcctgcagtgagccatgactgttgctgcactccagcctgagtgacagagtgagaccctgtctcagaaaaaaaaaaagcaggctcattttaaagttgtttatattttattttttgaaggaaataaagttgaagagatacnaaagggtagtgaagatnctccttcccctcctgtaattcagnctgtntagtttctattctcgcacagccctgttatcagtttctagtgtaagctngcagtgacttttactttatttataagcaagtgttagtgggtgttgtcatttcttttaaaaatataaattatactgtacatgctattttgtattttggcttttctcccacctaaacaccctaaagatcattttctgtcagtatataaaatcttggtgatgccaatacccatcccttagattgtacaagcagcatttngccatgctttatcccatagcctgcctcctgcagtctcatctttttttctatatgcgtgtccaagtaagttgtagacatttttcacttttaatcctttcagcatacatgtcatgggaattngtnntnngtttntgnntntntngtgtttgagacagtcgctctgtcacccaggctggagttacagtgacgtgatcccagctcattacngnctccacctcccagtttcaagcaattctcatgcctcngattcccgagtagctgggattacagatgtgcaccannangcctgactaattttngtattttnagtagagatggggttncatcatgtnggcnaggctggtctggaactcctggcntccagtcattngcntgcntcggcntccnnaagtgctgggattncngnnnnnnncnaccannnncannnnnnnttggagtttttttgagggagatttgcagtaaggtgaataaatgttaagtgtatcatttgatgaggttttttctttttttttttttttttgagatggagtcttgtatcgcccaggctagagtgcagtggcctggtcttggctcactgcaacctccacctcctgggttcaagggagtctcctgcctcagcctcccgagtagctgggattacaggtgtgagccaccatacccagactcatttgatgagttttgatgtaaaagcatgtaactcaaacccctatgtctggaacatctgtattacatctgaattttttcacctagtcaattcctgcacctctctctcctgtcccttcttccctcccctggcagtcagctactgttaggattttgttcactgtagattaattttgcctattctagaacttcatataacggactcacttatgcagtatgtattctgtaagttccttttactcagcatgtttgtatgttcatcagtgtgtttaagctttgttcctttttatggctgagcagtgttctatgtatgaatgccacattttaacgtttcacctgttaggtgaacaactaactggtgaacaatgggctgtttctagtttggggctatcatgaataaagttggtatgaacatgt

SEQ ID NO: 211 - DNA, 1712 bp, Homo sapiens
  modified_base (557)..(557): a, c, g, t, unknown, or other
  modified_base (573)..(573): a, c, g, t, unknown, or other
  modified_base (581)..(581): a, c, g, t, unknown, or other
  modified_base (604)..(604): a, c, g, t, unknown, or other
  modified_base (623)..(623): a, c, g, t, unknown, or other
  modified_base (655)..(655): a, c, g, t, unknown, or other
  modified_base (865)..(865): a, c, g, t, unknown, or other
  modified_base (896)..(896): a, c, g, t, unknown, or other
  modified_base (904)..(904): a, c, g, t, unknown, or other
  modified_base (944)..(944): a, c, g, t, unknown, or other
  modified_base (1380)..(1380): a, c, g, t, unknown, or other
tttcctctccctttgcattaccttttattacctcatgccaggctggaatttgggaaatctgtttctattacaatgtatacattatacattaaataagattatgcacattacaaataaaattatttcaaaattaagaaattacacatagttcaattaaaattaaatttgaaaataattttatttgtgctgttctttagagcaccaacaattcatacacatgatcttcattctcatagccacttaaggtaagtattacctccattttagaggtgaagaaattaaggttcaaaataactaatttggtgatggccacatagtttttaagaacgttgagtctagcccaagagtgactggaattttcagttcacttaccaccattccagcagaatagcagagcaatttcaattttgcagtaaatcagggttaatcatcccagaactgtttgatagcaaaagactaaaacaactcaagtgcctaccaacagtggacaggttacataaaatataatgcatttgcataatgcagtacatgcaactgtgtacaggaagctctgtatngttctcatagggaaangttctccnaagatagattgttatgaaaaggncaagtgcagaaaagtctancacagtctgctacctgacaagaatgaaaaaangtgaagaaaacacgtatcattcattattgactgatatcagcaggaatgaatactgggcagatacacaagaaaaagaaaagtgaccacctgggtaagttgagggatggattctttatatataatctctttacttcaaatagtttgaaccctgtgaatgtaatacttatttaaaaaattaaacacattttgtattcagaagaacttcccctncaataatattctttctcttcattttatcctnccttatcntccccacacatgatgtagaatgtttttaataaaacaattngcggatgcagaatcaatcagtaatgtaggaatcagtaatgccatccatccacttattccttagaattggtaagtttggcaggcacttaggatcctggcatctctctgaaatgagaagcttttgcaacctcagcctccccaagtgctgggattacagatgtgagacaccagatcagcctcagaagacattttcttagtgccttttttccttctacctacaagcagtgaggttagctcttcctttgaaacggtaggggggctctgaaaagagcctttgggtttgatagcgtttccgggagctcagatacctgtcaaatcacttgcccttggccttgtggtgactctcggtcttcttaggcagaagcacggcctggatgttaggaaggacgccgccctgagcaatggtcacccggcctagcagtttgttgagctcctcngtcgttgcggatggccagctgcaagtggcgcgggatgatgcgagtcttcttgttgtcgcgagccgcgttgccggccagctccaggatctcggcggtcaggtactctaacaccgccgccaggtacaccggcgcgcctgccccaacccgctctgcgtagttgcctttacggagcaggcggtgcactcggcccaccgggaactggagaccagcgcgagaagagcgggatttcgctttggcgcgagctttgcctccttgcttaccacgtccagacattgcaatcagacaaaaatcaccaaaaccagcagcctaagctcacgagaaaacaaacaaaa

SEQ ID NO: 212 - DNA, 2192 bp, Homo sapiens
  modified_base (666)..(666): a, c, g, t, unknown, or other
  modified_base (691)..(691): a, c, g, t, unknown, or other
  modified_base (711)..(711): a, c, g, t, unknown, or other
  modified_base (713)..(713): a, c, g, t, unknown, or other
  modified_base (720)..(720): a, c, g, t, unknown, or other
  modified_base (726)..(726): a, c, g, t, unknown, or other
  modified_base (736)..(738): a, c, g, t, unknown, or other
  modified_base (740)..(740): a, c, g, t, unknown, or other
  modified_base (1057)..(1057): a, c, g, t, unknown, or other
  modified_base (1061)..(1061): a, c, g, t, unknown, or other
  modified_base (1063)..(1076): a, c, g, t, unknown, or other
  modified_base (1225)..(1225): a, c, g, t, unknown, or other
  modified_base (1229)..(1229): a, c, g, t, unknown, or other
  modified_base (1234)..(1234): a, c, g, t, unknown, or other
  modified_base (1241)..(1241): a, c, g, t, unknown, or other
  modified_base (1264)..(1264): a, c, g, t, unknown, or other
  modified_base (1267)..(1267): a, c, g, t, unknown, or other
  modified_base (1269)..(1272): a, c, g, t, unknown, or other
  modified_base (1279)..(1279): a, c, g, t, unknown, or other
  modified_base (1284)..(1285): a, c, g, t, unknown, or other
  modified_base (1287)..(1289): a, c, g, t, unknown, or other
  modified_base (1291)..(1291): a, c, g, t, unknown, or other
  modified_base (1296)..(1296): a, c, g, t, unknown, or other
  modified_base (1299)..(1300): a, c, g, t, unknown, or other
  modified_base (1307)..(1307): a, c, g, t, unknown, or other
  modified_base (1310)..(1310): a, c, g, t, unknown, or other
  modified_base (1319)..(1319): a, c, g, t, unknown, or other
  modified_base (1323)..(1325): a, c, g, t, unknown, or other
  modified_base (1615)..(1615): a, c, g, t, unknown, or other
  modified_base (1618)..(1618): a, c, g, t, unknown, or other
  modified_base (1623)..(1623): a, c, g, t, unknown, or other
  modified_base (1627)..(1627): a, c, g, t, unknown, or other
  modified_base (1631)..(1631): a, c, g, t, unknown, or other
  modified_base (1637)..(1637): a, c, g, t, unknown, or other
  modified_base (1643)..(1643): a, c, g, t, unknown, or other
  modified_base (1648)..(1648): a, c, g, t, unknown, or other
  modified_base (1657)..(1657): a, c, g, t, unknown, or other
  modified_base (1660)..(1660): a, c, g, t, unknown, or other
  modified_base (1667)..(1667): a, c, g, t, unknown, or other
tttcagaatactgtataaaattaaatagaatattgtaatagtttaaggttttgcatatattgggttaaatatttctgaaaagcaaaattatttcaagttttcaaatatcttgacatggaacactgcctttgctaggagtcatttctagaaattacttaaaataggagacaagcatcaatcatagggatttcagctttagaactattggaacaaatctaggttagacaaccagcttatattattaagcaagattacatataataatcatctttttttaaaggagagacttttgcaaatattatacagcaatcaaaaggtcttagcttagtgtatcatccttattagaaaccaagatgttgcattttatttcagtgctttctgtagtcatagctaactcttttacctcagcaatttcaatcaaaaagcttctctatcattctatacataaaatgcagacacattagcagtcaacattatgaatgcctttacaggtaaacaaacaaaatcactttattactggattttataaccaattcccattcttttttgtgactattcaggagaatactgggttgaccctaaccaaggatgcaaattggatgctatcaaggtattctgtaatatggaaactggggaaacatgcataagtgccaatcctttgaatgntccacggaaacactggtggacagantctagtgctgagaagaaacncngtttggnttgganagtccatggnnngnggttttcaggtaggaaaggatatacctttttttaaataagtcacctctatatcctttgtattcttcctatatgttcatcacaaagcaaagttactaggttggtacaaacataattgcagtttttgctactgaaagtgatggcatgcaataaaaatattttcacacataaaatactcgtacataaaatatataaacagcccatattacaatatgcatacacatactacatgaatccctcgcgtgcagttacaactgaaatgtttgatctgttttatttgttccctattacagtttagctacggcaatcctgaacttcntgangnnnnnnnnnnnnnncagctggcattccttcgacttctctccagccgagcttcccagaacatcacatatcactgcaaaaatagcattgcatacatggatcaggccagtggaaatgtaaagaaggccctgaagctgatggggtcaaatgaaggtgaattcaaggntganggaantagcaanttcacctacacagttctggaggntgntnnnntgcacgntaggnnannntnttctncannataggtnatnaagcagtcngcannntagtttaatcatgcaaattattttgaatagaataaataaaattaataggatgaaataaagatagcatttggtatgaattacatacattgcatctactgattcattgcagggaatgttaaatgcaacaaaatggatcttagcctccagatgaaaaccagttgaaataaaagcatttaaaatttaaatccataatgcaaactttatcagataattgggatagttactatatgttttgaataatacctgtcacattaactcagtttgaaatatctgttttttaaaattttaanggntaacnttcnaatnctctcnatttgnttatngttatttgngancaaaggnaaaactcacttctaatattagcgaatttcattgtgagagacctatcctctttttaataaaccatttataaacctgttagcaatggccggaaccaggcctcctgaggatgcactggtctatagcaattgccctgctgcatttactaagaatccttacaaggcatttgtttaagaatattgtttatcaactaagaagattacagctttgaagtagagcaggtctcatatacatgaataataacatggcacgatgaatgcttctttagagtaaaaaggttttctttaacttgttaagtcagagttgtctaagtaattgtaatgtcatgatcatgtacattttgtccttttttacagaaacacactggggaatggagcaaaacagtctttgaatatcgaacacgcaaggctgtgagactacctattgtagatattgcaccctatgacattggtggtcctgatcaagaatttggtgtggacgttggccctgtttgctttttataaaccaaactctatctgaaatcccaac

SEQ ID NO: 213 - DNA, 1197 bp, Homo sapiens
  modified_base (954)..(954): a, c, g, t, unknown, or other
  modified_base (1002)..(1004): a, c, g, t, unknown, or other
  modified_base (1026)..(1029): a, c, g, t, unknown, or other
ctgaagtatttttagttatataagattggaactaccaagcatgtggctcctggtcagtgtaattctaatctcacggatatcctctgttgggggagaagcaacattttgtgattttccaaaaataaaccatggaattctatatgatgaagaaaaatataagccattttcccaggttcctacaggggaagttttctaatactcctgtgaatataattttgtgtctccttcaaaatcattttggactcgcataaactgcacagaagaaggatggtcaccaacaccaaagtgtctcagactgtgtttctttccttttgtggaaaatggtcattctgaatcttcaggacaaacacatctggaaggtgatactgtgcaaattatttgcaacacaggatacagacttcaaaacaatgagaacaacatttcatgtgtagaacggggctggtccacccctcccaaatgcaggtccactgacacttcctgtgtgaatccgcccacagtacaaaatgctcatatactgtcgagacagatgagtaaatatccatctggtgagagagtacgttatgaatgtaggagcccttatgaaatgtttggggatgaagaagtgatgtgtttaaatggaaactggacagaaccacctcaatgcaaagattctacgggaaaatgtgggccccctccacctattgacaatggggacattacttcattcccgttgtcagtatatgctccagcttcatcagttgagtaccaatgccagaacttgtatcaacttgagggtaacaagcgaataacatgtagaaatggacaatggtcagaaccaccaaaatgcttacatccgtgtgtaatatcccgagaaattatggaaaattataacatagcattaaggtggacagccaaacagaagctttatttgagaacaggtgaatcagctgaatttgtgtgtaaacggggatatcngtctttcatcacgttctcacacattgcgaacaacatgttgggatgggnnnctggagtatccaacttgtgcannnngatagaatcaatcataaaatgcacacctttattcagaactttagtattaaatcagttcttaatttcatttttaagtattgttttactcctttttattcatacgtaaaattttggattaatttgtgaaaatgtaattataagctgagaccggtggctctcttcttaaaa

SEQ ID NO: 214 - DNA, 7028 bp, Homo sapiens
ccggacatgaagcgctacctgtgggagcgctacccgggaggcgaagagaagcacagaagaattggttccttccattatgagcaacttgttgaatccagatgccattttctcaaacaatgaaatgagcctgtcagacattgaaatctatggcttcgattatgattacaccttggtgttttattcaaagcacctccacacgctgatatttaatgctgcacgggaccttctcatcaatgaacaccggtatccagcagaaatcaggaagtatgagtatgacccaaattttgcaattcgtggacttcattatgatgtacagcgggcagtattaatgaagatcgatgcttttcattatatccagctgggaactgtctacagaggcctcagtgttgtccctgatgaagaagtcattgaaatgtacgaggggtcccacgtgcccttggagcagatgagtgacttttacggaaagagctctcatggaaacacgatgaagcagttcatggacatcttctccctgcccgagatgaccctcctgtcctgcgtgaatgaatacttcctcaagaacaacatcgactatgagcctgtgcatctgtacaaagatgtcaaggattcaattcgagacgtccacatcaaaggaataatgtacagagcaattgaagcagacattgaaaagtacatctgctatgctgagcagacccgcgcagtgttggccaaactggctgatcatggcaagaagatgtttctcatcaccaatagccccagtagctttgtggacaaagggatgagttatatcgttgggaaagactggagggacctgttcgatgtggtcattgttcaggctgagaagccaaacttctttaatgataagcggaggcctttccgaaagatgaatgagaaaggtgtcttactctgggataaaatccataagttgcagaaaggccagatatacaagcagggtaatttatatgaatttttgaagcttactggatggagaggatccagagtgttgtattttggtgaccatatatacagtgacctggcggatttgaccctaaagcatggctggaggactggtgcaatcatcccagagttgagatctgagctcaaaatcatgaacacggagcaatacattcaaaccatgacctggctgcagaccttgactggcttattggaacagatgcaggttcacagagatgctgagtcacagctggttttgcaggagtggaaaaaggaaaggaaggagatgcgagaaatgaccaagagtttcttcaatgcccagtttggaagcctgttccgcacagaccagaacccaacctacttcctaaggcgcctgtcgcgcttcgctgacatctacatggcgtctctgagctgcctcctgaactatgacgtcagccacactttctacccccggaggactccactgcagcacgaactgcccgcctggtcagaaaggccccccaccttcggaacccctctcctgcaggaggcccaggccaagtagccaagggcaaaaactagaaactgtaactgcccctgattgggcaggcatgatggggttgacttcatgtgggtctgagtgttgcttttggaaaagatacagataagccttttgatatttattttgtaccttacggagaataattctcccaatgattaagacaggagctagcagcccacccctccagcctttccccccatgcagggctgaaaggcaagcttcacattggaactctgattttgcctttttgtttactgaggtcctggaacatcaggtttcctgggataggtagaccacttgatgccatgtctgtattctagcaggtcaagcttgaaaccgttcttgactcctccatggaacatttcctgaacatttacgggctatgcattgggaactgcaggggcacagtgatgggcaaagattagctgcttccagaaggctgatttcgtgggctccacaatggtaaaacgctgctgtgagtggcagagaggttccccaggtgatggccagttcccaaatcatttggtactaaggctttgacattctggcacatcacatcaaatagaacacagcctccctggaaggacttaagtgagaaagaacaagagaagctgcaactcctggacccttttgtcctcagtgtgtggttcctgcgtccttccccagggcaggagagaggagatgagagctctggtcaaaacctgccagctagtggaacagccttctatagagccttctgcaagaaacgagtgggtttgaagaaccaaaacatttgtggtaggtctcccaggagcttgttaaacctggaaacaccacctgagttggtttcatctgctcattggaagaaagaaaatgaaccaggaaaaagcatctttgtcatgaaatgctatgccatgccacccacccagttgaattggaatcctgttaaaacatgagatttaccagaaacagtcctttgtctagatggaaacaaacaagatcctggcttctctctaatgagttaccaactgagaggtgcttggattggccaggggaggaggaagatggccaccacaacttagccatgtccagccttctcttagatttcactcctgtgatgtttgtgcgactatttgggagtttgtatagtttgtttttttttttttgttttgttttgtttttttttagatgtctaagatgggaaagggcgaaggacattgaagctaaggaatagatatgacctagctaaccaagcttttctcatttctttctgttttgttttgttgagatggagttttgctcttattgcccaggctggagtgcagtggcacaatctcagctcactgcaacctctgcctcccgggttcaagcgattctcctgcctcagcctcccaagtagctgggattacaggcatgcactaccacacccagctaattttgtatttctagtagagatggggtttctccatggtggtcaggctggtctcgaactcctgacctcagataatctgcccgccttggcctcccaaattgctgggattacaggtgtgagccaccgcacctggcctgcttttttcatttctttctaggggcaatgcaagtggcatgtattccttttgttggagggaagaatccttaattgcacctggatttgtagtatccttcaatgtaaagtgcatatttactgcactctctgagtgctatgggaatgtctgctgttattagttatggggctgctaatactgttttaattgcatatgctatatcaatacttctgttcagattagcctgatctagtattgctaaaactcattttaagcttttgcggtaacttgtatatattcttaaatctaaaggatggcaggaacatgaggggagcttgtggagagtgcttgcttattcaacatttttattgtgataaatgtatgtaaccatctattgatgaaatccaagtctggcattccatgggctccttgccagatggcagaaacttaatgagttatatagcatcctttgtaatgctgcttgttatagttggaatgtacttgtgatatttggctgtatttaactataatggtgaaggtgaccctttagatccaataaggcttctccccatcttttcttctacattttgttatgaacacagtaaggcacagtagtatgttctttttttggaacagggtaggcattttgtttattgtttgcttgcttctaggtgttttcgccatcagggtgtattggaggctgacacttaatgggtgtgtgttacgcccagaactgctcggtgtcggggttctaaaagaatgcgctggtgttcttggcttcaagtttctgctttggagaagcagattcaggaagtaggtgttgcttaaaaataattcttggtttttatctaatcagatattcattgattacctaccaggtgccagttatagggtgttttgtttactcaagaatgaagtagaactatttttaaaacctgtttccatgagtgttcacgttaggtgacctaagctttgaaggagaaaaacattttctgggtatgaataatgagttttgtaatcaattcccagttagaagaatttcagtctctgggccattgagcttggcagtgttgagatctcccatgtgacagaagcctggcatctgggccaccaaggctcactgactgtgtaccttgcagactgtagacccatgtcgtggcggtaacggggccaaacacagtcattcccatgtgaacgatggaggcacatcccactttattattaatccttgtatatactcagtcaggacagattttaacttgtcgctgtcatgactttttttttttttttttgaggcaaggtctcgctctgttgcccattctggagtgcagtggtgtgatctcggctcactgcaacctcttgcctcccaggttcaagcaattttcgtgcctcagcctcccgagtagctgggactactggtacatgccaccaggcctggccaagttttgtagttttaatagagatggggtttcaccatgttggccaggctggtctcaaactcctagcctcaagtgttctgcccacctcagccttccaaagtgctgggattctgggtgtgagccactgtcatgcctggcctcgtcatgactcttttctctttttttttttttttttttttgagatttagttttgctctttttgcccaggccggagtgcaatggcacgatcttggctcactccaacctccgcctcctgggttcaagtgattctcctgcctcagcctcccgagtagctgggattacaggtgcccaccaccacatccagctaatttttttgtatttttagtagagacggggtttcaccatgttggccaggctggtctcgaactcctgaccttgggtaatccacctgccttggcctcccaaggtgctgggattacaggcatgagccaccgtgcccagcctatcatgactcaactgggatctggcacactgcactgggtgttttgttctctgatgtgcacattgatgaatgcatattggtacaagggaaacgaatctgttttcagccatttaaaaaattgtgttgtaaagcaaacaaaaatagcttgaacatttaaaaattactgtttaatattgtttgactgattttctaagaattatgtgaacaatgatgagtccagggcagcagccatcacaaatatgacagtccagcaaggcccatggaggtccctttggaagggacttgcacagctgattttctttttccagtgttgtttttacgggtgaaacgtggcttttgaaatactttagttgtttggcttagagctcccactttccccctaacatagtgcctgtctgttttttaaaacattttacccttcggcactattttctgctattcccattaatattatgtaacataaaccacttgctactgatttgggcatattacagactacaattactagttgctttgaatgcattggcactcttaattattgcaaaggagaattgaaaagtagtcttgtggtcctagttaatttagctttgggcaaactaagtggcttttcttctgtcctcttctcaaaaggccttttaagcagcagagactgggctaaatactggaactgaattccacttttctgcctgctcatttgctgccaaagaccacttggggctccttgtctagaatgctctaagacgaaatttggccagacacagggttccttgattgttctgttcaactaatagagaacctacattttgccttcttaatatcgactttcttttgtaccaggtttttctttctttcttttttgccttaggagcttagctcaaagttcagctaacctttgacactactagtgtcatttagtaacagtaatctttgacactactagtgtcatttaggagcttagctcaaagttcagctaacctttgacactgctagtgcgttcaagaaagggtagggaatgaagtacccttaatgcagggtcagcaaacttttcctgtaaaaggccagataggaagtatttttggctttttgggctgtttgcttttgctactactactgtgggaatgaccatggtcatggctgtgttccagcacaacttgatttaccaagacaagctgtgggctgtatttggtcctcaggctgtggcttgctagcccctgctctaatggattgtgttggcggcaatggcaagattcccttgctgagaacatgcagatgaataaccttatagctgggatgcagagaggagaaagttctgtaggtaataagtgcactgtattccctctgagctacttcctgggcatagttacatgtatggccagtgtgtgtacttgagccatcaggctcagacacttgttgaatatacctctcattgcattagtttgtaattgtgctagtgctgggtgctgagctcagctgcccggatgacctttccagactgaaggacatactcccctaacagctgggagtgctgctggctggccatttacttccagcccttatgaggagtttcccctgctgaagagccctgcctgccccagatcatacccccttcctgcctgtaacccttaccggctccatatggggtacaaaggtctggcctcctcaccccaacttgggaaaccctctggggccatcccagctccagagccccttgtggggtcagtgagacctcattgtggccacattacagcccagtgcctctccctgacaagcctgtacccagccggctcagcccacagcactgtcctatgaaccttcctgcacgccattctccacctcagtatctgctttcggggaacccaacctgcgacagtgcttctgtgtgttttcagtcctgcaggtttgaactctgactttggagacttttccagttatctcgtggaatgacagattgtgcctgtatgatatcaggcacaattaatgcaaattaggcagacctatttattctagatgtgaatttgctatttattttaaatgttgattttatgtgttatgtgactctgaacttattgccaaataaaagtttgaattgtaaaaaaaaaaaaaaaaaa

SEQ ID NO: 215 - DNA, 2764 bp, Homo sapiens
agacgcgcaagggcgccgatggaggcagactcgccagcgggccccggcgccccagagcccctcgcggagggagcggcggccgagttctccagcctgctgcgcaggataaaaggcaaactcttcacctggaatattttgaaaacaattgccctgggtcagacgttgtccttgtgtatatgtgggacagccatcaccagccagtatttggcagaaagatacaaagtgaacacccccatgcttcagagctttatcaattattgcttgctgttcctaatttatacagtgatgctggcatttcgatcaggcagtgataaccttttagtaatcttgaaaagaaaatggtggaagtacatcctgctgggactagcagatgtggaagctaattatgtgatcgtcagagcctaccagtacacaactctaaccagtgtccagcttttggattgctttgggattcctgtgttgatggctctgtcatggtttattcttcatgcaagatacagagtgatccacttcatcgccgtggctgtctgtctgttgggtgtaggaaccatggttggtgcagacatactagcagggagggaagacaattcagggagtgatgtattgattggtgacatcttggtccttcttggggcttccctctatgccatttcaaatgtttgtgaggaatacatcgtgaagaagctgagcagacaggagtttttaggaatggtgggcctgtttggaacaattatcagtggtatacagctattgattgtggaatataaggatattgccagcattcattgggactggaaaattgccctgctgttcgtggcatttgccctgtgtatgttttgcctgtacagcttcatgccattggtgattaaagtcactagtgccacttccgtcaacctgggcatcctgacagcggacctctacagcctttttgttggactctttctgtttggctataagttttcaggactctacatcctgtccttcactgtcatcatggtggggtttatcctgtactgctccacccctactcgcacggccgagccggctgaaagcagcgtgcctccagtcaccagcattgggattgacaacctggggctgaagctggaggagaacctccaggagacccactctgctgtcttgtagctggagaagatggcgcacccatcccccaccaggataaagcagagcctgctgcctgctgaggggacacttggggaaatagcagactcagaatggacactctacaaccctgggttggatccagtggttaggttttagaaaggaacactgaacaaagttcaaaagtagaaataccaaaatagagcagaaaccaagctaagagtgtgtttctgtgtttgaggaccaatatctgttcgtgttgaggagatgaggtgcagactccacactggggtcttagaggcaccggtgggaaagcaggactggggagagatccaggactgagccagcctcaggccagggcgggaaagcaggctgtccaggctgggcttggtggtcaggaacaggggcagctcacggtggctctggagtacgtttcctctgtcagatgcttcaaggtttttttttttttttttttttgctgaggcagttattgtccacaggcctttgggtacagatgaggcctcggggctgactgcatgtggcagaaaacgggtgggtcagcccttgaaaagtcttgagatataagtgtgagtactatacaagcattaaactggagtgcagtaaacctaggaaccttcccacaattgtttttttgtttgtttgagatgcagagtctagagtgcagtggtgcaagctcagcttactgtaacctctgcctcctggattcaagtgttagtagctgggattacaaaagcatgtggccccacgcccagctaagttttgtatttttagtagacatggggtttcaccatgttgcccaggctggtcttgacctcccgacctcaagtgatctgcctgccccgacctcccaaagtgctgggattacaggcttgagccaccgtgccaggcctgttttgtttgtttttgtagagagatggggtttcgccatgttgcccaggctaatctcaaattcctgagctaaagcgatctgcccacctcggcctccgaaagtgctaggattacagatgtgaaccactgtgcctggcctgtttgtttgtttgtttaaaacatttctccatcactcattccaggtcccagagcaaactctctctgctctcggagcctgtgacactggctatgtgctccacagtttcagtcccaggtcatactctccaacagttttcagagctccatatatatgtagatgccatcctttctaaaaacttctcacgacctcctggaatattcctattgatctcattttatttagcatcagctcaagaaactaagtcttagtgcacagtatcacaacaaagaaaaagctttgtttttataactggtaaaaacaagaaaagattctcatcaaaatgaaaatataaaattaatcatttctcaccaaagagtatgcctgggagcctccagctgttaaaagacaatgctattactacttcttatcaaaaatctgtaatgccctgtgatttttatgatacttcttcaatacaaagtgttaatatgtgtcatcagtataataacaaccaacaaaatgccactttcagaaaactgtatgtaaattttttgtaacaatgtaaaaaagaaatggggagtaagtgttcacatcattaaaaggctttgaattcatggaaat

SEQ ID NO: 216 - DNA, 2279 bp, Homo sapiens
gctgacggggtggcagtgcggcgggttacggcctggtcagaccataatgacttcagcaaataaagcaatcgaattacaactacaagtgaaacaaaatgcagaagaattacaagactttatgcgggatttagaaaactgggaaaaagacattaaacaaaaggatatggaactaagaagacagaatggtgttcctgaagagaatttacctcctattcgaaatgggaattttaggaaaaagaagaaaggcaaagctaaagagtcttccaaaaaaaccagagaggaaaacacaaaaaacaggataaaatcttatgattatgaggcatgggcaaaacttgatgtggaccgtatccttgatgagcttgacaaagacgatagtacccatgagtctctgtctcaagaatcagagtcggaagaagatgggattcatgtagattcacaaaaggctcttgttttaaaagaaaagggcaataaatacttcaaacaaggaaaatatgatgaagcaattgactgctacacaaaaggcatggatgccgatccatataatcccgtgttgccaacgaacagagcgtcagcatattttagactgaaaaaatttgctgttgctgagtctgattgtaatttagcagttgccttgaatagaagttatacaaaggcttattccagacgaggtgctgctcgatttgctttgcaaaaattagaagaggccaaaaaagattatgaaagagtattagaactagaaccaaataactttgaagcaacaaatgaactcaggaaaatcagtcaggctttagcatccaaagaaaactcatatccaaaggaagctgacatagtgattaagtcaacagaaggagagcgaaagcaaattgaagcacaacagaataagcagcaggccatttcagagaaagatcgggggaatggatttttcaaagaggggaaatatgaaagagcaattgaatgctatactcgagggatagcagcagatggtgctaatgcccttcttccagctaacagagctatggcctatctgaagattcagaaatatgaagaagctgaaaaagactgcacacaagccattttattagatggctcatattctaaagcttttgccagaagaggaactgcaagaacatttttgggaaagctaaatgaggcaaaacaagattttgaaactgttttacttctggaacctggaaataagcaagcagtaactgaactctccaaaattaaaaaggaattaattgagaaaggacactgggatgatgtctttcttgattccacacaaagacaaaatgtggtaaaacccattgataatccaccgcatcctggatcaactaaaccactcaagaaggttattattgaagaaactggtaatttgatacagactattgatgtgccagatagcactactgctgctgctccagagaataatcctattaatctagcaaatgtaatagcagccacaggcaccacaagtaagaagaattcaagccaagatgtcctttttcccacaagtgatactccaagagcaaaagtattgaaaatagaagaagtcagtgatacttcatccctgcaacctcaagccagtttgaagcaggatgtatgtcagtcttacagcgagaaaatgcccatagagatagaacaaaaacctgctcagtttgccacaactgttcttcctccaattcctgcaaactcgttccagctcgaatctgatttcagacaattgaaaagttctccagatatgttgtatcagtatttaaagcaaattgaaccatctttgtatcctaagttgtttcagaaaaatctggatccagatgtattcaaccagatcgttaaaattctgcatgacttttacattgagaaagaaaagccattactcatctttgaaatcttacaaagactttctgaactaaaaaggtttgatatggcagtgatgtttatgtcagaaacagagaaaaagattgcacgtgcattatttaatcacatagacaagtcaggattgaaggatagttctgtcgaagaactcaagaaaagatacggtggttgatttccatttttgctgaaataattgtttttgactttcatatgtaaattttttctactgaaagtgttttgctttttaagaaaatgaaattatatagcaggaaaggactatctttgaacataagttaattaactataaggtgaattgtgatttaactagtgagaattgtattcaagtgaactctgtttttctgaaaataaaaatataaacaatgagaaaaaaaaaaaaaaaaaaaaaa

SEQ ID NO: 217 - DNA, 3998 bp, Homo sapiens
ccgggagcccgggcgccctggagtgaggaggaccgggagctggctctggaggctgcggaggcgacgccggagagaacgaagcctcggctgggagcggatctttcgaagatggtttggctgccttggagatttggagatctgatgccacgatgaggactcacacacggggggctcccagtgtgtttttcatatatttgctttgctttgtgtcagcctacatcaccgacgagaacccagaagttatgattcccttcaccaatgccaactacgacagccatcccatgctgtacttctccagggcagaagtggcggagctgcagctcagggctgccagctcgcacgagcacattgcagcccgcctcacggaggctgtgcacacgatgctgtccagccccttggaatacctccctccctgggatcccaaggactacagtgcccgctggaatgaaatttttggaaacaacttgggtgccttggcaatgttctgtgtgctgtatcctgagaacattgaagcccgagacatggccaaagactacatggagaggatggcagcgcagcctagttggttggtgaaagatgctccttgggatgaggtcccgcttgctcactccctggttggttttgccactgcttatgacttcttgtacaactacctgagcaagacacaacaggagaagtttcttgaagtgattgccaatgcctcagggtatatgtatgaaacttcatacaggagaggatggggatttcaatacctgcacaatcatcagcccaccaactgtatggctttgctcacgggaagcctagtcctgatgaatcaaggatatcttcaagaagcctacttatggaccaaacaagttctgaccatcatggagaaatctctggtcttgctcagggaggtgacggatggctccctctatgaaggagttgcgtatggcagctacaccactagatcactcttccaatacatgtttctcgtccagaggcacttcaacatcaaccactttggccatccgtggcttaaacaacactttgcatttatgtatagaaccatcctgccagggtttcaaaggactgtggctattgcggactcaaattacaactggttttatggtccagaaagccaattagtgttccttgataaatttgtcatgcgtaatggcagtggtaactggctagctgaccaaatcagaaggaaccgtgtggtggaaggtccaggaacaccatccaaagggcagcgctggtgcactctgcacacagaatttctctggtatgatggcagcttgaaatcggttcctcctccagactttggcacccctacactgcattattttgaagactggggtgtcgtgacttatggaagtgcactacctgcagaaatcaatagatctttcctttccttcaagtctggaaaactggggggacgtgcaatatatgacattgtccacagaaacaaatacaaagattggatcaaaggatggagaaattttaatgcagggcatgaacatcctgatcaaaactcatttacttttgctcccaatggtgtgcctttcattactgaggctctgtacgggccaaagtacaccttcttcaacaatgttttgatgttttccccagctgtgtcaaagagctgcttttctccctgggtgggtcaggtcacagaagactgctcatcaaaatggtctaaatacaagcatgacctggcagctagttgtcaggggagggtggttgcagcagaggagaaaaatggggtggttttcatccgaggagaaggtgtgggagcttataacccccagctcaacctgaagaatgttcagaggaatctcatcctcctacatccacagctgcttctccttgtagaccaaatacacctgggagaggagagtcccttggagacagcagcgagcttcttccataatgtggatgttccttttgaggagactgtggtagatggtgtccatggggctttcatcaggcagagagatggtctctataaaatgtactggatggacgatactggctacagcgagaaagcaacctttgcctcagtgacatatcctcggggctatccctacaacgggacaaactatgtgaatgtcaccatgcacctccgaagtcccatcaccagggcagcttacctcttcatagggccatctatagatgttcagagcttcactgtccacggagactctcagcaactggatgtgttcatagccaccagcaaacatgcctacgccacatacctgtggacaggtgaggccacaggacagtctgcctttgcacaggtcattgctgatcgtcacaaaattctgtttgaccggaattcagccatcaagagcagcattgtccctgaggtgaaggactatgctgctattgtggaacagaacttgcagcattttaaaccagtgtttcagctgctggagaagcagatactgtcccgagtccggaacacagctagctttaggaagactgctgaacgcctgctgagattttcagataagagacagactgaggaggccattgacaggatttttgccatatcacagcaacagcagcagcaaagcaagtcaaagaaaaaccgaagggcaggcaaacgctataaatttgtggatgctgtccctgatatttttgcacagattgaagtcaatgagaaaaagattagacagaaagctcagattttggcacagaaagaactacccatagatgaagatgaagaaatgaaagaccttttagattttgcagatgtaacatacgagaaacataaaaatgggggcttgattaaaggccggtttggacaggcacggatggtgacaactacacacagcagggccccatcactgtctgcttcctataccaggttgttcctgattctgaacattgctattttctttgtcatgttggcaatgcaactgacttatttccagagggcccagagcctacatggccaaagatgtctttatgcagttcttctcatagatagctgtattttattatggttgtactcttcttgttcccaatcacagtgttagcactgaagctataaattacctggtcattttgtgatcacaagagtctatgcaaaaaaaaaaatttctttaccccagattatcagatttttttccctcagattcattttaacaaattaagggaagatattttgacacaagaaagcaggaacgtggagaaattggagcaggaaaagaaattatcaaagcaatagaaatagcttggtggtcctatggtgtttttggaagtatttggcattgctaattgagcagtccatatagtactacttttagaagaaacaaaaagtctattttttaaagtaatgttttttcttatgagaaaaaggtttagatagaattgggttttattaatattaatttaatgctattagcaatttccatatactatattgtggaaaagactgaagaatacaattctgagaaatataaaaaaattttaatggtatactcatgttgaaagataaatgttgctaagtcctggtatgatggtgtgagcttccttggggaagtacttcttgagttatgtaactaacaggatgttttactacagatctggatggctattcagataacatggcaaaaaatgatagcagaagatcattaaaaacttaaaatatattttattagaaaacatttatctatgaatgaatatttccttgatgctggtctctgcacacatatgcttggttacttgcatgcattcattggttgttcaataagtgagatgattacagataatactgtattttccttatatggaaaaccgttatagacccaataacaactaaacctttcaaaagaaaatattttctattatgaatgttgattttcataccaaagaagatggagagtctaaaatttggatatgattcttatgtttttttaatagaaaaccttcttcaagtttattttcctaaataaacatcataattgtgaaaaaaaaaaaaaaaaaaaaaaaaaaaaaaaaaaaaaaaa

SEQ ID NO: 218 - DNA, 599 bp, Homo sapiens
cgggacgcggatgcagacgcaggcggaggcgctgacggcggggatggccggggtggccacagctgccgcgggggcgtggacacagccgcagctccggccggtggagctcccccagcgcacgcgccaggtccgggcagagacgccgcgtctgccgcagggggtcacgaatgcggccgcacatattcaccctcagcgtgcctttcccgacccccttggaggcggaaatcgcccatgggtccctggcaccagatgccgagccccaccaaagggtggttgggaaggatctcacagtgagtggcaggatcctggtcgtccgctggaaagctgaagactgtcgcctgctccgaatttccgtcatcaactttcttgaccagctttccctggtggtgcggaccatgcagcgctttgggccccccgtttcccgctaagcctggcctgggcaaatggagcgaggtcccactttgcgtctccttgtaggcagtgcgtccatccttccctagggcaggaattcccacagttgctactttcctgggagggcctcatgttttatctggttcttaaatgtttgttactacagaaaataaaactgaggtattatt

SEQ ID NO: 219 - DNA, 2514 bp, Homo sapiens
  modified_base (314)..(314): a, c, g, t, unknown, or other
  modified_base (686)..(686): a, c, g, t, unknown, or other
  modified_base (987)..(987): a, c, g, t, unknown, or other
  modified_base (1173)..(1173): a, c, g, t, unknown, or other
  modified_base (1350)..(1350): a, c, g, t, unknown, or other
  modified_base (1866)..(1866): a, c, g, t, unknown, or other
catacattattttgtatatactgtatatgatgacttcagtgagcagtgaccattgtcgaggtgctcgggaaaaaccacagatttcagcagcacaatcaacgcaaccacagaaacaagtggtacaggcaacagctgaacagatgcgtctcgctcaagtgatctttgataagaatgattcagattttgaagctaaagttaagcagcttatggaagtgacagggaaaaatcaggatgaatgcatagtggccctacatgattgtaatggagatgtgaacaaagctatcaatatattgctggaagggaattcatacacnacttcatgggagactgtagggtgtaagaaaaagaattttgcaaaagaaaattcagaaaacaaagagaatagagagaagaggacggctgctgctgaactgtccagcagccctctctctcagctcagcagctccctctctggccaccagaacagcatgacctctgcacatgcgacacgttccacaagcacgccacacactcatgccagcgtggagagcaccgcatcctccgccgccttctcagcagcggcgacctctgctccaagtgccccgtcctcaggggttgtcctgcctgggagcatgagcactgtgagcagcctgtgcctgggggggaccactgtgagcgtccctagcagcagcaccagggccacggcnttggtgacctcaggcaaagcacccccaaacctgcctcaaggggtgcctcccctgctacacaatcagtacctcgtgggccctggaggactgcttcctgcttacccgatttacggttatgatgagctccagatgctgcagtcacggctgccaatggattactatggaattccctttgcagcacccacagcccttgccagccgagatgggaatctagctaataatccatattcaggtgacgtcacaaagtttggccgaggagactctgcatcccctgcacctccaacgaccaccagctcaggcncagcagagccagtctcaggcacagcacacagcccagcagcccttcgtgaatcctgcactgccacctggtatagctacactggtcttccctactacacaggcatgcccagtgccttccagtatggccccaccatgtttgtccctccagcctcagccaagcgacatggggtgaacctcagcactcccncacctcccttccagcaggccagtggttatggccagcacggctacagtacaggttatgacgacctgacccaggggacagcagcaggagactactccaaaggtggctatgctggatcatcgcaggcaccaaacaagtctgcaggttctgggcctggcaaaggagtatcagtgtcttcangcaccactggtctacctgatatgactggttctgtctacaataagacacagacttttgacaagcagggatttcatgcagggacgcctccacctttcagcctgccctcggtcttgggctccactgggcccctggctcagggagcggcccctggctatgcacccccaccattcctacacatcttgccagcccaccagcagccccactcacagctgctgcaccaccaccttccgcaggatgcacagagtggctcgggtcagcgcagcagcccagctccctgcagcccaagtctcaagcctccaaacctgcctacggaactctccatactggacaaactaaacccagaagagaggggtgggctggggcaaggcttatcctgggcaggagagaacacacgagcacgtatttgggagcccagtgccctttcctagaattccccgacatgtgtcagccatgcctctgtggggagtctgcctcccagactgggctactgtatgtaatgtatttatgtatgtattngtaaatgtgatagaagtctgggggggagttgggggatggcggcagatgttagccaggtctgccctccccattcaagccccttctccactgtagcaaaataagcacccccaccccatctgccttcaggtcttcttcacagcctgcactgcccagtgggccactaggggcagtctctggaagggctggttcaaggctgtttgggtataggggtcaggtaccaatgaagaatcacgacttgtctcactcctttggaaattgttttctttcctgtgtaattacttcatacctctgtttttgagaaactgttccgtttgtcatctgtcatggtctccttccaccaaatcttcatctgggaatagcagcggtatccctccacccaagtatggccacctgtttgtcttcatatagaacaggggcttctggtctggtcatgtccctagagacttactagagactggctgaccatgaaaaaaaaaaaaataatctgagttattcagccagtcagctcccctttaaaaatctaaggtatctccaagcaacacatctccattctagttgtcttgaaccacgtgggcaactgtttcaggggttttctcttgcccaatccccacctaataaagttctgagagcatgaaaaaaaaaaaaaaa

SEQ ID NO: 220 - DNA, 2493 bp, Homo sapiens
tgggctaccagtgggctcccatcctagccaacttcctgcacatcatggcagtcatcctgggcatctttggcaccgtgcagtaccgctcccggtacctcatcctgtatgcagcctggctggtgctctgggttggctggaatgcatttatcatctgcttctacttggaggttggacagctgtcccaggaccgggacttcatcatgaccttcaacacatccctgcaccgctcctggtggatggagaatgggccaggctgcctggtgacacctgttctgaactcccgcctggctctggaggaccaccatgtcatctctgtcactggctgcctgcttgactacccctacattgaagccctcagcagcgccctgcagatcttcctggcactgttcggcttcgtgttcgcctgctacgtgagcaaagtgttcctggaggaggaggacagctttgacttcatcggcggctttgactcctacggataccaggcgccccagaagacgtcgcatttacagctgcagcctctgtacacgtcggggtagcctctgccccgcgcccaccccggcgcctcgccctgggctgaccgcagctgccgcgagctcgggccaaggcgcaggcgtgtccccctggtggcccgcgctctcactgcagcctgtgcccaaccccgcgtctgcatctggagatgcggacttggacgtggacttggacttggacttggatttgagcttggctcttcgcagcccggacttcggaggagtggggcggggcgggggaggggcaccacgggttttttgttttttgtttgtttgtttttaatctcagccttggcgtgagctggggccttcctctcttctccagcctctccctttcactcttcgcccagcatcctgcccccctgtccaaaaacagcaggacatcaggcccatcccatcccaccacactcactcaccagctctggggaaagctactgtgaactaggagcaggattcctgggttctaatcgcaggtccatcactgactgtgacgtctagcaaagcccttgccctctctgagcctcggtttccgcacctcaagtaattaatcccttagcaaatggactcttttagacttctcatttaactcaattccctgagctagactgggattaaaattctcattttgcagtacattaaaactgatgcccagagatgtgatttgcttgaggccacacagctagatttttggtggaagtgggccttgaacacagtgtactttctgcagtttctgactgtaaaacccagtgtctgctctctgagttccatttccaagcccccctccatcttggacctatgtggtctccaccatattcacacaccaccaccaccacttgccaatgcctctcttaaagcaatatacccattcgttctcttattgggaactggatggatgaagccccaaattcagccccacccacagagaagccttcctacactcagcctctgtccacccttggcaaatctttcaagctctctcctccaggaaagtggggccccaactcagtcactccacccccttccaggtccctgaggctggttctactgtatccccatcacctccacaactccactcacccctgacggctccatccacctcaccagttggaaggcttgtggtttcagagaggagcaatgctggtcagcgctgcccagactccagtgtttacagatcaccagcatttacaaccaatccaatggccagaagcctcctctaacaagcccagaaggagttctgaaggggcagatgggggtgtgagtagtcggggagtcgggattgccagcaccctcacccttccttgggggcaagtagaggtgagaacactttccccacctccctccacagacactcctgaggacgctgcatcccacgcactgcctggtgcgtccatagagagaggatcaggtctcagcatttcatctgtgaaagaggcatggccctgggttagaaaggagggcaggagacatggaggaactggggggcacccagatggtgcagatggtttgcacacctgagcctgtctgtggtgaccattccgctcctctcccactaccctccaatctatcattccctactctctaaggccaaaatatcctgagcaaggctggcaaccccaccccaccatcccaaatgcaagcagccaggcccaggagttcctctggcccccacaggcatggagctcccagctggtgggtacagcttgagaggggggcagctccctcaggctaagctactgcccttcactgggccagccctgcctccagccctcacctctctcaccccaactctcccccaagcccctttctactcaacgggtgtagccactggtgctttgaagccttttgtttttataagatggtttttgcaaggggaccaggttctcttttcactgggaccttgcaaggaggggagtgctctcctggtttctgtgcaggcgggttgattaaagatggtgttttcttctct

SEQ ID NO: 221 - DNA, 1003 bp, Homo sapiens
tatacacagcccagccagcacccaggtccttccatccttctgctgcacatggggcgcctgacggaagcggcggcagcgggcagcggctctcgggctgcaggctgggcagggtcccctcccacgctcctgccgctgtctcccacgtcccccaggtgcgcggccaccatggcgtccagcgacgaggacggcaccaacggcggcgcctcggaggccggcgaggaccgggaggctcccggcaagcggaggcgcctggggttgttggccaccgcctggctcaccttctacaacatcgccatgaccgcggggtggttggttctagctattgccatggtacgtttttatatggaaaagggaacacacagagggttatataaaagtattcagaagacacttaaatttttccaaacatttgccttgcttgagatagttcactgtttaattggaattgtacctacttctgtgattgtgactggggtccaagtgagctcaagaatctttatggtgtggctcattactcacagtataaaaccaatccagaatgaagagagtgtggtgctttttctggtcgcgtggactgtgacagagatcactcgctattccttctacacattcagccttcttgaccacttgccatacttcattaaatgggccagatataatttttttatcatcttatatcctgttggagttgctggtgaacttcttacaatatacgctgccttgccgtatgtgaagaaaacaggaatgttttcaataagacttcctaacaaatacaatgtctcttttgactactattattttcttcttataaccatggcatcatatatacctttgtttccacaactctattttcatatgttacgtcaaagaagaaaggtgcttcatggagaggtgattgtagaaaaggatgattaaatgatctctgcaaacaaggtgctttttccagaataaccaagattacctgagtccaagttttaataacaagaataaacaactttgtgaa

SEQ ID NO: 222 - DNA, 1724 bp, Homo sapiens
tgcagcctcggccccgcgggcgcccgccgcgcacccgaggagatgaggctccgcaatggcaccttcctgacgctgctgctcttctgcctgtgcgccttcctctcgctgtcctggtacgcggcactcagcggccagaaaggcgacgttgtggacgtttaccagcgggagttcctggcgctgcgcgatcggttgcacgcagctgagcaggagagcctcaagcgctccaaggagctcaacctggtgctggacgagatcaagagggccgtgtcagaaaggcaggcgctgcgagacggagacggcaatcgcacctggggccgcctaacagaggacccccgattgaagccgtggaacggctcacaccggcacgtgctgcacctgcccaccgtcttccatcacctgccacacctgctggccaaggagagcagtctgcagcccgcggtgcgcgtgggccagggccgcaccggagtgtcggtggtgatgggcatcccgagcgtgcggcgcgaggtgcactcgtacctgactgacactctgcactcgctcatctccgagctgagcccgcaggagaaggaggactcggtcatcgtggtgctgatcgccgagactgactcacagtacacttcggcagtgacagagaacatcaaggccttgttccccacggagatccattctgggctcctggaggtcatctcaccctccccccacttctaccctgacttctcccgcctccgagagtcctttggggaccccaaggagagagtcaggtggaggaccaaacagaacctcgattactgcttcctcatgatgtacgcgcagtccaaaggcatctactacgtgcagctggaggatgacatcgtggccaagcccaactacctgagcaccatgaagaactttgcactgcagcagccttcagaggactggatgatcctggagttctcccagctgggcttcattggtaagatgttcaagtcgctggacctgagcctgattgtagagttcattctcatgttctaccgggacaagcccatcgactggctcctggaccatattctgtgggtgaaagtctgcaaccccgagaaggatgcgaagcactgtgaccggcagaaagccaacctgcggatccgcttcaaaccgtccctcttccagcacgtgggcactcactcctcgctggctggcaagatccagaaactgaaggacaaagactttggaaagcaggcgctgcggaaggagcatgtgaacccgccagcagaggtgagcacgagcctgaagacataccagcacttcaccctggagaaagcctacctgcgcgaggacttcttctgggccttcacccctgccgcgggggacttcatccgcttccgcttcttccaacctctaagactggagcggttcttcttccgcagtgggaacatcgagcacccggaggacaagctcttcaacacgtctgtggaggtgctgcccttcgacaaccctcagtcagacaaggaggccctgcaggagggccgcaccgccaccctccggtaccctcggagccccgacggctacctccagatcggctccttctacaagggagtggcagagggagaggtggacccagccttcggccctctggaagcactgcgcctctcgatccagacggactcccctgtgtgggtgattctgagcgagatcttcctgaaaaaggccgactaagctgcgggcttctgagggtaccctgtggccagccc

SEQ ID NO: 223 - DNA, 842 bp, Homo sapiens
gtggtatgtaccttagctgtgaggggggctgctgaaggcatggaggacagtaatgacggctgtgcctccttggatggtggagacctcagaaatggtctgctacacaggcactaggtcagtttcccgcccttagctgaatgcagatggatgctgggagatggatatggtgagatggtgtggggaggatgttagaaagctggaggtgtttatcacttctcaaggagctactgaatatagggggaaaaaaacaacaaaaagacaagcccagggagaaagcaccattaaggatatacctatgccagcttctatagctgcacctgctttattggcaggtcacttgccacaattgcatctgccctctaaactttttaattttcacactgtatcctagacatgaatgcataaaatacagtgtctggcgggataatgcagagaggtaccatcttgattttccccagttacattcacctggtctggtctctgtaagcttagaagagtagaatcactttattttttaaagacttccggccaggcacggtggttcacgcctgtaatgccagcactttgggaggccgaggcgggtggaccacctgaggtcaggagttcaagaccagcctggccgacatggcgaaaccctgtctctactaaaaaaaaatacaaaaagattagctgggtgtggtggtgtgtgcctataatcccagctactcaggaggctgaggcaggagaattcttttaacccaaaaggcggaggttgcagtgagccaagatcacaccactgcactccagcctgggcgacagaatgagactctgtctcaaaaaaaaaaaaaaaaaaaaaaaaaaaa

SEQ ID NO: 224 - DNA, 992 bp, Homo sapiens
agcgtttaaacttaagcttggagttatttccaccatgcccgggcaagaactcaggacgctgaatggctctcagatgctcctggtgttgctggtgctctcgtggctgccgcatgggggcgccctgtctctggccgaggcgagccgcgcaagtttcccgggaccctcagagttgcactccgaagactccagattccgagagttgcggaaacgctacgaggacctgctaaccaggctgcgggccaaccagagctgggaagattcgaacaccgacctcgtcccggcccctgcagtccggatactcacgccagaagtgcggctgggatccggcggccacctgcacctgcgtatctctcgggccgcccttcctgaggggctccccgaggcctcccgccttcaccgggctctgttccggctgtccccgacggcgtcaaggtcgtgggacgtgacacgaccgctgcggcgtcagctcagccttgcaagaccccaggcgcccgcgctgcacctgcgactgtcgccgccgccgtcgcagtcggaccaactgctggcagaatcttcgtccgcacggccccagctggagttgcacttgcggccgcaagccgccagggggcgccgcagagcgcgtgcgcgcaacggggaccactgtccgctcgggcccgggcgttgctgccgtctgcacacggtccgcgcgtcgctggaagacctgggctgggccgattgggtgctgtcgccacgggaggtgcaagtgaccatgtgcatcggcgcgtgcccgagccagttccgggcggcaaacatgcacgcgcagatcaagacgagcctgcaccgcctgaagcccgacacggtgccagcgccctgctgcgtgcccgccagctacaatcccatggtgctcattcaaaagaccgacaccggggtgtcgctccagacctatgatgacttgttagccaaagactgccactgcatatgaactagtactaagccgaattctgcagatatcc

SEQ ID NO: 225 - DNA, 953 bp, Homo sapiens
agacccagtcaggacacagcatggacatgagagtcctcgctcagctcctggggctcctgctgctctgtttcccaggtgccagatgtgacatccagatgacccagtctccatcctcactgtctgcatctgtcggagacacagtcaccatcacttgtcgggcgagtcaggacattagcaattatttagcctggtttcagcagaaaccagggaaagcccctaagtccctgatctatggtgcatccagtttgcaaagtggggtccaatcaaagttcagcggcagtggatctgggacagatttcactctcaccatcagcagcctgcagcctgaagattttgcaacttattactgccaacagtataaaagttatcctgtcacttttggccaggggaccaagctggagatcaaacgaactgtggctgcaccatctgtcttcatcttcccgccatctgatgagcagttgaaatctggaactgcctctgttgtgtgcctgctgaataacttctatcccagagaggccaaagtacagtggaaggtggataacgccctccaatcgggtaactcccaggagagtgtcacagagcaggacagcaaggacagcacctacagcctcagcagcaccctgacgctgagcaaagcagactacgagaaacacaaagtctacgcctgcgaagtcacccatcagggcctgagctcgcccgtcacaaagagcttcaacaggggagagtgttagagggagaagtgcccccacctgctcctcagttccagcctgaccccctcccatcctttggcctctgaccctttttccacaggggacctacccctattgcggtcctccagctcatctttcacctcacccccctcctcctccttggctttaattatgctaatgttggaggagaatgaataaataaagtgaatctttgcaaaaaaaaaaaaaaaaaaaaaaaaaaaa

SEQ ID NO: 226 - DNA, 6938 bp, Homo sapiens
  modified_base (297)..(298): a, c, g, t, unknown, or other
  modified_base (300)..(302): a, c, g, t, unknown, or other
  modified_base (305)..(306): a, c, g, t, unknown, or other
  modified_base (308)..(308): a, c, g, t, unknown, or other
  modified_base (310)..(310): a, c, g, t, unknown, or other
  modified_base (312)..(313): a, c, g, t, unknown, or other
  modified_base (601)..(602): a, c, g, t, unknown, or other
  modified_base (1534)..(1534): a, c, g, t, unknown, or other
  modified_base (1589)..(1589): a, c, g, t, unknown, or other
  modified_base (1602)..(1603): a, c, g, t, unknown, or other
  modified_base (3093)..(3093): a, c, g, t, unknown, or other
  modified_base (3095)..(3095): a, c, g, t, unknown, or other
  modified_base (3333)..(3333): a, c, g, t, unknown, or other
  modified_base (3345)..(3345): a, c, g, t, unknown, or other
  modified_base (3370)..(3370): a, c, g, t, unknown, or other
  modified_base (3816)..(3817): a, c, g, t, unknown, or other
  modified_base (3853)..(3853): a, c, g, t, unknown, or other
  modified_base (3911)..(3911): a, c, g, t, unknown, or other
  modified_base (4761)..(4761): a, c, g, t, unknown, or other
  modified_base (4778)..(4778): a, c, g, t, unknown, or other
  modified_base (4813)..(4813): a, c, g, t, unknown, or other
  modified_base (4843)..(4843): a, c, g, t, unknown, or other
  modified_base (4858)..(4858): a, c, g, t, unknown, or other
  modified_base (5147)..(5147): a, c, g, t, unknown, or other
  modified_base (5384)..(5384): a, c, g, t, unknown, or other
  modified_base (6368)..(6368): a, c, g, t, unknown, or other
  modified_base (6393)..(6393): a, c, g, t, unknown, or other
  modified_base (6687)..(6687): a, c, g, t, unknown, or other
  modified_base (6806)..(6806): a, c, g, t, unknown, or other
  modified_base (6808)..(6808): a, c, g, t, unknown, or other
ttttaatggtctgggcaggcttttattggtagcattcccaaaatccaaataagaactgttatttctatagttggaaattgttagtgtttgtgacttaatagtattaccacatatttctgattcatctatatgaacttatataatcttatagtttggacttggaagtcaaacaaaactcacacatgtatttaggcatataaatactcaaatttaagatatacaggtcaaaatataaccagtttaggggaaaatgatgttgtaaactaaatattgagaatgaaactgaaaacaattagnntnnnttnntntntnntacactttgagacatatgttttattattacagtttattcagtcatgaaaaatctattgcttgccctttttatcaataatactactctgacatttttaagggcagaggcagtgataattggtgtcatgttgcctttgtgggtaatgttgtagatagattttcatttataagccagtacatacatgatagaaggtatccgttgtatcttttaaacaaatggcaaacaaagtataccaccacatctccttttcactattggaaatgaaatagatctaatatggtcaaaggnntttttttttttttttttttttgacatgacaaaagcgtgcatttaatttgatgctttgcagagatacatgaccaaagttgtatgcatggcttgtcttttgggatggtcccagctgtttattttaaaagaaaaaaattaaaatagagccaacaaatgcaattaagaaaaaaaaagtattgagacacaaggggacctacatgttctggtctaagaagcatgcaagtattacaaagcattccagatacagtatgacagaggaacagtgaacaagcattggaacgatgctctttctttcagaaacgggaagtctaacagttatgttttcacaatggtagtgattaaaccatctttatttttaaggaattttataggaagaattttagcaccatcattaaaggaaaaataataatacctttttagccctgcctatctccagtcttggaataataacagaagcatagcacctttcagtatctaaaatataaacaagaatagtaagtccatcccagcttctagagatgaggtagctcatgctaagaaatgttgggtcatttttcctatgaaagttcaaaggccaaatggtctaattccaatcatcacatttgattagagtcagctccacaactcagtttctagatctttttcttcattataggcttcaggatgatgagattgtacatgtggaagagtctcaatttagagtccttggacatatgtttgtaaagttctatatgtcaattattttgcattcaatatcttcttaaataagaaagtgtaaatgtattaaatggtatatactagtgtgacttctatcaatattgatagattgatcaagaggagaaagatatctttaaatttgaatgagaaagatgtctaaacttatagtcttttacaaaaatttaagaagtcgaagtaaattcactttgttctccnaaaatgccactgaatatatactatttaaaaattctatttaagacagtgagaaacnttttttttttttnnaagattctccttaaagagtctctattatagttacacaatatcaagacatgcatgtaggtctcgatcacaagttaaacattttaaactcatttttaattgacaatcttggaatgagaggtcacaaaagggcactaatttctatttttcaactgcagccaagcaaaataaacatgtgttgtggctctatataccccactctttaagctacctgccaggaagaagaatttcctcataaatactaagcaactttttcattacactgaaataaattgaagaaaacggagatttatttattcaatcagtttactttctgcaaaggtggtcattgtcattggtcatcttaaacctaaactgttgtattgaaaaatatttaaaatcaattaaaacttgaggattgtaagtaaaataaatattctgaaggataaggaggccaggcacttaagaccatatatacaatgctgatgcaggatcagccattacttcaagagtctcaggatcaacttcaaacagtcaaagttcttgtgaatggcggtggtcattgatggtggtgctcattgtcgatgtgtcttggcttactttacacaaaacaaactggcccaatttcaacgccgaattcctggtctgtgccgccaacatccacaggagcaagatctatgatgggcaagcgtgccacattctgtgttctatattcaaagacagtcttgcccacatttccattccgcttagagcaagtgtcttgaagaacgatataccggaatctaatatttccctctgctttgatatctaagtcatttgcccctttgagaaccacagcttttttgaggttcttagcttgatcgtccatgtatcctacactgtttttacagatgtaagtgatgttctgggaggcttcttttgataaaaggcgcaaaaaagtcatctgagtaatggctgtattaggtgattggtggtctccataagcgaactgagaccctctgttcatatcaagaccataccaaacaggtttattgtcaggagatttactggcccaccaggttttacgtggtacactggatgggtttgctgaaatacatgtttctcctgtttccatgttgcagtaaactttgattgcatcttcaacagatccttggttaggatcaatccagtattcaccactctgctttgcggaatggcaaagctttaggtcatcacacgtgcgggctgggtgctttttcgagccatcggggctgcgcatggtttcaatctgactactgagtgacttcagggtagcatgaacccctgggtccgttttgtttttgtcatcaggagccgcctgatcttcagtaaactcaggaagtggatctggcatgctttcatcatagtgccccatgatatccccaagagcagctgtaaggtggccagggggacccggagggccaggtgggccaggctcaccaggagggccctcaggtcctgcttctcctacactgcctcgtacacctggaggtccnantggcccaagtggcccagggtttccttctttacctgaaggaccaactgggcctggaggacctcttgggccaaatggtccagggattccagcacttccttgttcaccatttggaccaggagggccaggaagaccctgaagaccagtaaagcctctgtggcccttctgacctctgtcgcctcggtctccatgatcacctttgtcaccacgaggtccttggggtccaggtaatccacgtttnccagctcgaccnaggtgtcctataggaccccgagaanccggatctcctctttgtcctgcatctcctggagcacccacagggccaggagttccaggggcaccctgagagcctggcagacctgcaggcccagggtctccacgatcaccacgttctccaacagcaccatcccgtcctggggtaccatcattgccagctggaccttctggtccaggttcccctacaggaccattggagcctgggggccccacaggtccaggtggacctttatctcctgttgcaccagttggtcctacttttcctggtgttcccgctgggcctggtaggccgggcatgcctctctctccacgttgcccaggcatgccaacaattcctctctgcccggtcgttccagctggaccaggggggccatctggaccaggttgcccatcttctcctgggtcccctttgtctcctgggccaccaggggggccagctggtcctcgnnctcccacacgcccatgagagccagggtccccacgangacctggaggtccctccttcccgggttcccctaggggtcccgcaggtcctggagctcnagcagggcctggaggtccaactctgcccgcagaaccaggaaatcctgtagcaccaggcggaccttgggttcctcgaccaccttttagtccaggaacaccattaggaccatgagggccaggggatcctgctaaaccttgtggtccaggagaaccagcatctcccttctgtcctggctctccaggttcaccttttactccaggctgtccgtcagacccctggggtccggcaaaaccaacagctccagttggcccattttcacctcgagaaccaggattgccccgggagccaggaggaccaactaaacctcgaggaccaggttcacccttttctcccagtaggcctgccggacctggagggcccaaaggacctggaagacctcctgcaccatcatttccagctgtgccttcagcacctttttctcctatgccacctctgtcacccttggggccaggagttcctgcaattcctctttctcccggcataccttgaagacctggtgggcctgtatctccaggggtcccagatggacctggactgccttttgggccatcaggaccatgtcctccagccattcccttctcaccagggagtccagttatcccaggttctcctctttccccaggatttcctcgttctcctctaggtcctaacgggccaactgctccgggacctccaggaacaccttgatcacctggttttccaccttctccaggaggacctggaggaccaggatgcccctgaaaacctgtgggccctggaggtccttgttctcctctttcaccacgtagacccggcggcccaggaggaccataaggaccaactttaccatcttttccaggagctcccctntgcccaggaactccagnatttcctgcttctccaggtttcccagggtcaccantgctacctttggggcctggaaggcccatgntcccgggctgccctntgattcctatggagcctggaggacctggacggccatcttcccctggcgcacccaaaggtccaagttttccttcaggaccttgaacaccaggatttcctgtcaaaccccgagcacctggaagcccaggttcccctggacgtcctggatccccctggcttcctttgggtcctgaagaacctacaggaccccgttctccttgagcaccctttggcccaggtaaaccatcagagcctggaaaaccacgattgccaggagcacccctttctcccactggccctggaggaccaantgttcctgggtcacctctgggacctcttttgccttcttcaccgggtgggcctatcggaccctgaataccatgtggccctggttccccttttgggccagcttctcctttgaaacctggatcacccggaaggcccgaattcccctgaggaccagtgctaccctgaggtcctggagatccaggaggccctgctgagccaggaggaccagaggtacccggagagcccgttgggcctttggnaccaggagtaccatcagttcctattgcaccaggaagacctggagagccaactggacctgggggcccagtttcacctctctgcccctgaggaccttcagggcctcgcgcccctgtaggacctgcttctcccttcattccaggatttcctggaaaaccagaagagcctggtatcccaagaggacccattggtccaggttttccaggcataccatgtgcacctcgttgtccaggagcaccctgtggcccaagtctccctctctctcctggcattcccctcggacccagaggacccatggcacccattggaccagtggggccagcttcacccttggaaccaggtgctccaacttcacctttagggccttcaagacctttgtgtcctcggtgacccttcagacctggaagaccaggagccccaggaaatccacgagctcccggagatcctgcaaatcccacttcaccaggatttccatttctgccaggttcaccatcttccccaggtttaccaggagggccctctggtccacgtgaaccaatcggacccattggtccaggatcaccaggttcaccaggaggtcctgtaggtcctgcaccaccttgctgtccttgtaaaccctgtggtccccttgggccaacaggacccacagagccaggcattagtcctacttgactcccaagtccagatttttcatccaacccagccatttgagctgaaaacggcctgctcaagccatcgggtcctgggtgggacggatgtccaggaggtcctggagcaccaggttgaccaggaacacctggttctccatcaattccctgaggtccacgagggccaggtcttccttttggccctcgctctcctcttggtccctgtgatcctggaggtcctgccggtcctggacgaccacgtatgcctgttacaacaggcactaatcctggttctcccttttgtccctttcttcctctaccaaaatttgtattgccacntccaggtgtttgtgaacagacaggncagcattccccagggggcgttacagggtcggcacagtccagcacatcctggcattctatcttgtcacagagaatggctccattgtcacagacacagatctgacaaggggcaggtttccaaatgtccctgtttaagtacatctggccattctgagtgcaggctatttcttcaccatatccttcatcctcgtcttcttcctgggcttttattgagacaaattgccctaataaaacaataagaatgaggagaggtcttgcttccgcccagtttgccatcatgtctaaatattagacntgtgggttctcctgagagtgaaaagtagattctgaggttattgtagcaccatgaagtcagctgtgggctcttctttcagcaccagccccagggcagcctctgcaaaccccctttttcancnccagctccagcacagtctgcgaaaacttttttcaagcgatgcagctttaaataggaagaatgctgcctccacttcttttcctgccccttttcagcttgttcaggctcataaccatccagtgtctgccaag

SEQ ID NO: 227 - DNA, 6938 bp, Homo sapiens; identical to SEQ ID NO: 226
  modified_base (297)..(298): a, c, g, t, unknown, or other
  modified_base (300)..(302): a, c, g, t, unknown, or other
  modified_base (305)..(306): a, c, g, t, unknown, or other
  modified_base (308)..(308): a, c, g, t, unknown, or other
  modified_base (310)..(310): a, c, g, t, unknown, or other
  modified_base (312)..(313): a, c, g, t, unknown, or other
  modified_base (601)..(602): a, c, g, t, unknown, or other
  modified_base (1534)..(1534): a, c, g, t, unknown, or other
  modified_base (1589)..(1589): a, c, g, t, unknown, or other
  modified_base (1602)..(1603): a, c, g, t, unknown, or other
  modified_base (3093)..(3093): a, c, g, t, unknown, or other
  modified_base (3095)..(3095): a, c, g, t, unknown, or other
  modified_base (3333)..(3333): a, c, g, t, unknown, or other
  modified_base (3345)..(3345): a, c, g, t, unknown, or other
  modified_base (3370)..(3370): a, c, g, t, unknown, or other
  modified_base (3816)..(3817): a, c, g, t, unknown, or other
  modified_base (3853)..(3853): a, c, g, t, unknown, or other
  modified_base (3911)..(3911): a, c, g, t, unknown, or other
  modified_base (4761)..(4761): a, c, g, t, unknown, or other
  modified_base (4778)..(4778): a, c, g, t, unknown, or other
  modified_base (4813)..(4813): a, c, g, t, unknown, or other
  modified_base (4843)..(4843): a, c, g, t, unknown, or other
  modified_base (4858)..(4858): a, c, g, t, unknown, or other
  modified_base (5147)..(5147): a, c, g, t, unknown, or other
  modified_base (5384)..(5384): a, c, g, t, unknown, or other
  modified_base (6368)..(6368): a, c, g, t, unknown, or other
  modified_base (6393)..(6393): a, c, g, t, unknown, or other
  modified_base (6687)..(6687): a, c, g, t, unknown, or other
  modified_base (6806)..(6806): a, c, g, t, unknown, or other
  modified_base (6808)..(6808): a, c, g, t, unknown, or other

SEQ ID NO: 228 - DNA, 662 bp, Homo sapiens
  modified_base (440)..(440): a, c, g, t, unknown, or other
  modified_base (514)..(514): a, c, g, t, unknown, or other
  modified_base (540)..(543): a, c, g, t, unknown, or other
  modified_base (587)..(588): a, c, g, t, unknown, or other
tttacaggaacacagatttgatgttttaataaaaatacgatttctacaaaaggtgcttaacacggcccaggacgggctgtccggtggagtcagccgtaggacccctgaaggatttacaaagacagagccggctcaccagcacactcctgccagcaccgggacccactgcgaacaaagacagagccggctccccagcacgctcctgctagccctgggacccactgtgagccactgcggggtgtccttcatttaaaaaaagtctggactgtgacactgcagaaggagtctgaaagcccaattcctgaatccctgcgttagaactgagagttcaggccgggcgcggtggctcatgcctgtaatcccagcactttgggaggctgaggcgggtggatcacctgaggtcaggagttgaagaccagcctgaccaacatgatgaaacnccatctctaataaaaacttgcccgtaatcccagcactttgggaggccgaggtgagtagatcacgaagtcagganatcgagaccatcctggctaacacggnnnnacactgtctctaataaaaatacaaaaaaattagccaggtgtggnngcgggtgcttgtagtcctggctactcgggaggctgaggcaggagaatggcgtgaacccaggaagcggagctggc

SEQ ID NO: 229 - DNA, 4590 bp, Homo sapiens
  modified_base (668)..(668): a, c, g, t, unknown, or other
  modified_base (709)..(709): a, c, g, t, unknown, or other
  modified_base (745)..(745): a, c, g, t, unknown, or other
  modified_base (752)..(752): a, c, g, t, unknown, or other
  modified_base (763)..(763): a, c, g, t, unknown, or other
  modified_base (768)..(768): a, c, g, t, unknown, or other
  modified_base (777)..(777): a, c, g, t, unknown, or other
  modified_base (788)..(788): a, c, g, t, unknown, or other
  modified_base (1097)..(1099): a, c, g, t, unknown, or other
  modified_base (1101)..(1104): a, c, g, t, unknown, or other
  modified_base (1656)..(1656): a, c, g, t, unknown, or other
aacatggtcatttttattaaagtaaaaaataagatagtagtagctctggacatttggaaatgtgtatgtttgtttacaccctgtgaaaagtagacatggtctgcaaaagagccaatctcctaaatatatttctttctctagaaatgttattttgggacaaatgaatgaatccctgttgggaaaaaagaacctgctgcatatcatccatattttattttattattattttttttgagatggagtctcactctgtctcccaggctggagtggagtggcacaatctcggctcactgcaacttctgcctcctgggttcaagcgattctgctgcctcagcatgcccagtagctgggattacaggtgcatgccaccacacccggctaatttttgtattttagtagagacggggtttcactatgttggccatgctggtcttgaactcctgacctcaagtgatccacccgcctcggcttctggaattacaggtgtgagccaccgcacccagccatgatccatactttaatgtgggttctggattgcttcctaggccacgtgtttaacatgccacatgatgatgcaaagcagtgtgccagccttaatggtgtgaaccaggattcccacatgatggcgtcaatgctttccaacctggaccacagccagccttggtctncttgcagtgcctacatgattacatcatttctggataatggncatggggaatgtttgatggacaagcctcagaatccnatacagntcccaggcganctccntggcacctngtacgatgccnaccggcagtgccagtttacatttggggaggactccaaacactgccccgatgcagccagcacatgtagcatcttgtggtgtaccggcacctctggtggggtgctggtgtgtcaaaccaaacacttcccgtgggcggatggcaccagctgtggagaagggaaatggtgtatcaacggcaagtgtgtgaacaaaaccgacagaaagcattttgatgtgagtttttctactgaaacacattcagaattgaaaagaacaaagtgatggtaaaagatatgataccaagttaaacatccccatccgtgtcctctannngnnnngcgagatagcttatttttagaactgattctttgtcccatgtggctttctttgataccctaaaagttctctttagataattctaatgctgatgatttatgtctccatttagacgccttttcatggaagctggggaatgtgggggccttggggagactgttcgagaacgtgcggtggaggagtccagtacacgatgagggaatgtgacaacccagtcccaaagaatggagggaagtactgtgaaggcaaacgagtgcgctacagatcctgtaaccttgaggactgtccagacaataatggaaaaacctttagagaggaacaatgtgaagcacacaacgagttttcaaaagcttcctttgggagtgggcctgcggtggaatggattcccaagtacgctggcgtctcaccaaaggacaggtgcaagctcatctgccaagccaaaggcattggctacttcttcgttttgcagcccaaggtagttcgtttttaccttatttttacctaaaaatcaaggcctgggcttgctaccttttcaaacaatttttgttatactntctttgctttccatattaacatatcttcaatttcaaatttgaactccttttcttttacattaattggcaactgcctgctttgagtttagtgttttcagttatgaatgaagcttaaatctaacacttcacatgcttgcaattgctcgctattactcttttatatgcaaagaaaagctttttggacagtcaagcgctcctctgtgcgactaggcttcacatacagctcatagttagatacattttatattcacacagtaaccagtagttttggaaaatagtctatgcatggtccaaaatacttgttactgggtaactagcagtagcaggtgcaaacagaataatagaagtggtagtctgagtattgattatttttatgtttgaaaacacatattgaactaggaaaagcatcatttcttttgctgttttgctaagggaatacatctggatctgagacagaaaatggaatttaatgtgattgagatgatcgtgtgtcattagcaccataggctatgaaaatattcccaagttgcagattcaatattcagcaagtgatttctgaagcacttactcttgccagatactaattattctaggctctgaagatacagcagtaaacaaagtgacaaacagctctactttcattgaccttagctggaggagacataggtcaatagataaataatttttaaaaatatctaatttcttcagatgtctatacgtagtactgaaaaatatgccaaagtgaagggtaaatgcatgaaatgcataatgtgtagagggtactgtgtttaattagcatggtcaggaaagtagagagaaaatgtttacacttatcattgcagcatctccttcctttgcttgtatgtaacactagacatgtgtccttttttcaggttgtagatggtactccatgtagcccagattccacctctgtctgtgtgcaaggacagtgtgtaaaagctggttgtgatcacatcatagactccaaaaagaagtttgataaatgtggtgtttgcgggggaaatggatctacttgtaaaaaaatatcaggatcagttactagtgcaaaacctggatatcatgatatcatcacaattccaactggagccaccaacatcgaagtgaaacagcggaaccagaggggatccaggaacaatggcagctttcttgccatcaaagctgctgatggcacatatattcttaatggtgactacactttgtccaccttagagcaagacattatgtacaaaggtgttgtcttgaggtacagcggctcctctgcggcattggaaagaattcgcagctttagccctctcaaagagcccttgaccatccaggttcttactgtgggcaatgcccttcgacctaaaattaaatgcacctacttcgtaaagaagaagaaggaatctttcaatgctatccccactttttcagcatgggtcattgaagagtggggcgaatgttctaagtcatgtgaattgggttggcagagaagactggtagaatgccgagacattaatggacagcctgcttcagagtgtgcaaaggaagtgaagccagccagcaccagaccttgtgcagaccatccctgcccccagtggcagctgggggagtggtcatcatgttctaagacctgtgggaagggttaaaaaaaagaagcttgaagtgtctgtcccttgatggaggggtgttatctcatgagagctgtgatcctttaaagaaacctaaacatttcatagacttttgcacaatggcagaatgcagttaagtggtttaagtggtgttagctttgagggcaaggcaaagagaggaagggctggtgcagggaaagcaagaaggctggagggatccagcgtatcttgccagtaaccagtgaggtgtatcagtaaggtgggattatgggggtagatagaaaaggagttgaatcatcagagtaaactgccagttgcaaatttgataggatagttagtgaggattattaacctctgagcagtgatatagcataataaagccccgggcattattattattatttcttttgttacatctattacaagtttagaaaaaacaaagcaattgtcaaaaaaagttagaactattacaacccctgtttcctggtacttatctaatacttagtatcatgggggttgggaagtgaaaagtaggagaaaagtgagattttactaagacctgttttactttacctcactaacaatggggggagaaaggagtacaaataggatctttgaccagcactgtttatggctgctatggtttcagagaatgtttatacattatttctaccgagaattaaaacttcagattgttcaacatgagagaaaggctcagcaacgtgaaataacgcaaatggcttcctctttcctttttttggaccatctcagtctttatttgtgtaattcattttgaggaaaaaacaactccatgtatttattcaagtgcattaaagtctacaatggaaaaaaagcagtgaagcattagatgctggtaaaagctagaggagacacaatgagcttagtacctccaatttcctttctttcctaccatgtaaccctgctttgggaatatggatgtaaagaagtaacttgtgtctcatgaaaatcagtacaatcacacaaggaggatgaaacgccggaacaaaaatgaggtgtgtagaacagggtcccacaggtttggggacattgagatcacttgtcttgtggtggggaggctgctgaggggtagcaggtccatctccagcagctggtccaacagtcgtatcctggtgaatgtctgttcagctcttctgtgagaatatgattttttccatatgtatatagtaaaatatgttactataaattacatgtactttataagtattggtttgggtgttccttccaagaaggactatagttagtaataaatgcctataataac

SEQ ID NO: 230 - DNA, 5661 bp, Homo sapiens
  modified_base (7)..(7): a, c, g, t, unknown, or other
  modified_base (2992)..(3001): a, c, g, t, unknown, or other
  modified_base (3003)..(3007): a, c, g, t, unknown, or other
  modified_base (3591)..(3591): a, c, g, t, unknown, or other
  modified_base (3634)..(3634): a, c, g, t, unknown, or other
  modified_base (3636)..(3643): a, c, g, t, unknown, or other
  modified_base (4305)..(4305): a, c, g, t, unknown, or other
  modified_base (4307)..(4307): a, c, g, t, unknown, or other
  modified_base (4332)..(4333): a, c, g, t, unknown, or other
  modified_base (4343)..(4343): a, c, g, t, unknown, or other
  modified_base (4346)..(4348): a, c, g, t, unknown, or other
  modified_base (4350)..(4350): a, c, g, t, unknown, or other
  modified_base (4352)..(4353): a, c, g, t, unknown, or other
  modified_base (4355)..(4355): a, c, g, t, unknown, or other
  modified_base (4360)..(4363): a, c, g, t, unknown, or other
  modified_base (4365)..(4365): a, c, g, t, unknown, or other
  modified_base (4605)..(4606): a, c, g, t, unknown, or other
  modified_base (4847)..(4847): a, c, g, t, unknown, or other
  modified_base (4873)..(4874): a, c, g, t, unknown, or other
  modified_base (4941)..(4941): a, c, g, t, unknown, or other
  modified_base (5059)..(5059): a, c, g, t, unknown, or other
  modified_base (5138)..(5138): a, c, g, t, unknown, or other
  modified_base (5231)..(5231): a, c, g, t, unknown, or other
  modified_base (5595)..(5595): a, c, g, t, unknown, or other
  modified_base (5608)..(5610): a, c, g, t, unknown, or other
  modified_base (5612)..(5613): a, c, g, t, unknown, or other
  modified_base (5615)..(5620): a, c, g, t, unknown, or other
ccaccgncccctcctccccctcctctccctaatcaagtaccccctcctcctccaccacctcctgccccacccctccctgcatctggattctttttggcatccatgtcagaagacaatcgccctttaactggacttgcagctgcaattgccggagcaaaacttaggaaagtgtcacggatggaggatacctctttcccaagtggagggaatgctattggtgtgaactccgcctcatctaaaacagatacaggccgtggaaatggaccccttcctttagggggtagtggtttaatggaagaaatgagtgccctgctggccaggaggagaagaattgctgaaaagggatcaacaatagaaacagaacaaaaagaggacaaaggtgaagattcagagcctgtaacttctaaggcctcttcaacaagtacacctgaaccaacaagaaaaccttgggaaagaacaaatacaatgaatggcagcaagtcacctgttatctccagaccaaaatccacacccttatcacagcccagtgccaatggagtccagacggaaggacttgactatgacaggctgaagcaggacattttagatgaaatgagaaaagaattaacaaagctaaaagaagagctcattgatgcaatcaggcaggaactgagcaagtcaaatactgcatagaggaacagactaaggagagataggactttaatctggaggaaaaatatcctacaaacaacaactgttcacaacagcaaacccctacatttatgagctgtaagaagaaaatggagacaaacagaaggagggaaaaaccaacctactctgaaagccttcagacattatgactctggtgataagctctttccctctccgtttgctgcttttttctggcctttacaacagaatggaagagaatcatttaagagttcctgtaacagttatgcagaaaatactaaaacccatcaggcaagatcaccacgcattgaaatattttcatatcaagataaagtcgcacattttccacaatacattgctaaaataaagaggagaaaggcttaggaagtttttttgcagagagtgctggtaaagaattgagcaagtttgctattgtattgtaatgtttctctcaggtttgttcttcctatcatgtttgatattccatgaataattgagatcagccctatgtaagttaagatcataatatgtggaacaaatggaattgtaagtgctttcaaagggtaatatttataagaaagtgtccgaaaaatgtttcttcagcttgagaaattttagaatgataggaagtttctcgagttagccttcatgcaattttgtagattaaaacataaaatttgtccagaacttaaagatttagatgccttcctaaattgttacaatgctttaccaaatctatgacttctacataacacaaaccagtggtcaaatgtaaacactatattgtagatttactgtaggttttcaaccttttttagatttatgcatgtggacatttttataatgtaattacaatcaccacaaggttagcttttttaattgcagacagtaatgcatgtcacactaatatgtagtggccttttcaaggcctagtcccagggaaaacattttgtagagtataggggagtgggaggaaggggaggaataattttttatttaaagttgatttctgcactatctttttctcagttacctgcatgaataaataatgagaaatattttgtgactttaattggtaaatatgttacaaaaccaagtacttaatcttttacatcatgtcttcagctatttgtattttaaccagtaatttcaatggtctgaaacatgattctgagcttcacataatatcttaactgtggaactcaaaagtttgatcactgaatttggcagttattattacctaggtacccccgctgttacacaggtgtttagatacgtgttcctgaatgaagctgcttttgaattttgttatgttgaaatgcaagaaataacaatgatggcagcaattaaggtcacagaaatcattaggtaaaggaaaaccaatgaggagttctgcagttttcttttaataagtaaagtgagacttgggtggtgggaagaaggaaggtgggaagaaggaattagacactctgcctgccactctgcgtgtgtgtgctctcgcgcacgtgctgtctatatggaagccactcccttttctttcctttgaaactggtaaggttaaaataggggagaaatcctacatgttggaatgatagctttttggaaaatttaagaaactctccaggctctccatcttgatttatgcttgagttgttatgtgccatatttgctttgaactctgattatcagaagttttactaaaactttgaaataattcactttcatctgctttctagattttgtacatctcagtccataaagcaaagcttgttgatagtgtagttttctaaacgctgcaaatttgcagcctttaccactacaaagaagtttggatgagggattttttttttctttgtcaaaatagttcctgtttctgtagaaatttcatttttagattaaactgtgatggatgagctatcataattcaagtatacatttcttttttctatcagatattcattgtcatgcagtagtagtaaaaacatcaaagatgcagcaagcttattaagtattattttctaaaagaaataggaggcattttcatctttattattgtacttttggttatgcaaacactttgataatataaacagttatgtcccctataaatctggtcagcaacctcttttgattttgttgggtaagttaaatagtctgtagtaggtagagtactgggtacaagtggtccaaactaagataagagactaaaataaaatgctaaatcttaaaagaaactgggtttatgcactaaacgttttgtgccttggtctaatattaacatgatgtatgtgtaaactgacaaaaaaaaaaaaaaaaaaaaaannnnnnnnnnannnnngctatatttcccatcatcccagattgctaaatgttctttccaagaagtctgaatgaattattatatacatttgctatcatacatgacagttgtgtcattattagagatttcagtaattaaaatgggaaacagaagcctaagttatttaccttatcaaaaccacgttccttggaaccacattattatgatggtttttgtgctcttgtacgttggatgtcttaagctgagtacagtttaggggatcctttctaatgacaggaaggcactgctttcctcaacactgtgatctgacctgtgacaagtctgtactatccactatgtaaatggctcacaagtcaattgcaaacaaactgaatgtacaaatcttagtgctggtgctgaaatctcttcagaatagtcatcatgatttaaaagtttgtttaaaaatttgcaagcatcaagtgtcaatcaaaactgaagatgaaacactaatgaatgttgaattctcatgcttttaggtgtacttcctttttagaattttcagttttctgctatttttaccgtaactatttcgtttaaatttgtttcatttaagtttcctacangctaacttcgtttgtgcgattgaaataaaattgcagtatatanannnnnnnngtttgtgacacttagataatcttctgaaataatttgttttaaagtaagttatattggatgtgaaaaacaccttttaaagtccaagactttactacttaaaagtttacatgtcacgtcactattctttacagatttcatagaagtcgtgaatactaagtaatgtatacaaaagaaatatgtgatgatgtgtctactttttgtttgaaataactgttgggtgttccctcttcttattttctctctgcccaccttgacacagtaacttcctcttatagtcaagatgatgattaagtgtttaatttttattccattttgttctgcaacacgttcagatacttaaaactcattcatgcagttagaattatcctttatgtagtttgcatggtaaaggacattgtgtggtaaagggcattattgagtaatgaattttaagtatagcaaaatatgtatagtgtttatacatgatgctgatttcttaaaacctacatataagcagtagtactttttctctattataaagtattaattttgagttccattttataattctgatgtcttcattagaaatacaaaaatacaatccttgtattttttctttgaccagacccaaattttccccttcccccctccattctcctctccacttctcgtggaccgcgtgntnccaatattcattaacatttgcagcnnttacagagtnacnnntntnnanttttnnnntnttttttttttttgctctagcctgtctcatgttcttgcttctcttcatatgtaagtcagtatttttgtctacaaattaaaagtcacttgtcattcaaaaatgagttaagtaacatgataatcttttaaatttacctagctacaacttttatgtctcttgtaaatttatatatactttcagtgccattgtgaagaattggccttttaattctaagtagtattaccctatgaagcacagtgtnnaaaggtatgctacaaggtctctttaattcctgtgtggccattataattttataacaccattaccctttaaattctaccgattataagcagcgtaaaagtaactatataaagcaaacatcgcaaaggaactctgcaggagctcttaattcctttatgtagctatcataaaattcactttcctgaagacatttactctcattcacttccaaactccaaacctttttctggtagcaccactttngtttttaatagaaagatgagttcatnnctgtacatctctccaaagctctaaggaatgagaaaaggatcctagtatattgaaattactgatgttnaatacctctgccttttcactaaaagccatttaatatttttaaagtcaaaacttgacatacaggtatttataaggaatctccatgactctgaaggaatgaaattgatgtaggtagcttnggctatgtaaagacatagtagaggacaattacttaaagaagagttttcttttgaggatttgtagatttgactaagcagnctgaagtcagtaacccctcaagaaaggccgtttatagaagccaagaactgttggaggtctgtgatgcaggtttttctgttcccaacatcaaangctgtggattatttggtgtgttcccctttatgttatctctcgataatttttgagacatcaagattttttaaaatatcaatactggaaagatgaaaccttcaaattaaaacctaaaattgattagaaagaaaagtaaaatattaatgcagtaaatttaggatggttacagatactcaccatcaacataaataaatggagttctaggataaattatttgtggaatactaatggtcaagtcacataagagtaaaatcttttggtgaggagacacatttgacaactgctaaagaattaactaaatttgtctttctaaatagttttctttataaagtaacagaaacattgtaaaaggataaataaatgnctgtcataatgannnannannnnnnaaaaaaaaaaaaaaaaaaaaaaaaaaaaaaaaaaaaaaaaa

SEQ ID NO: 231 - DNA, 3524 bp, Homo sapiens
  modified_base (4)..(4): a, c, g, t, unknown, or other
  modified_base (19)..(19): a, c, g, t, unknown, or other
  modified_base (680)..(680): a, c, g, t, unknown, or other
  modified_base (708)..(708): a, c, g, t, unknown, or other
  modified_base (832)..(832): a, c, g, t, unknown, or other
  modified_base (843)..(843): a, c, g, t, unknown, or other
  modified_base (852)..(852): a, c, g, t, unknown, or other
  modified_base (874)..(874): a, c, g, t, unknown, or other
  modified_base (902)..(902): a, c, g, t, unknown, or other
  modified_base (911)..(911): a, c, g, t, unknown, or other
  modified_base (931)..(931): a, c, g, t, unknown, or other
  modified_base (996)..(996): a, c, g, t, unknown, or other
  modified_base (999)..(999): a, c, g, t, unknown, or other
  modified_base (1002)..(1002): a, c, g, t, unknown, or other
  modified_base (1007)..(1007): a, c, g, t, unknown, or other
  modified_base (1014)..(1015): a, c, g, t, unknown, or other
  modified_base (1018)..(1018): a, c, g, t, unknown, or other
  modified_base (1032)..(1032): a, c, g, t, unknown, or other
  modified_base (1037)..(1037): a, c, g, t, unknown, or other
  modified_base (1045)..(1045): a, c, g, t, unknown, or other
  modified_base (1049)..(1049): a, c, g, t, unknown, or other
  modified_base (1055)..(1055): a, c, g, t, unknown, or other
  modified_base (1065)..(1065): a, c, g, t, unknown, or other
  modified_base (1083)..(1083): a, c, g, t, unknown, or other
  modified_base (1101)..(1101): a, c, g, t, unknown, or other
  modified_base (1119)..(1119): a, c, g, t, unknown, or other
  modified_base (1123)..(1123): a, c, g, t, unknown, or other
  modified_base (1164)..(1164): a, c, g, t, unknown, or other
  modified_base (1802)..(1802): a, c, g, t, unknown, or other
  modified_base (1945)..(1945): a, c, g, t, unknown, or other
  modified_base (2319)..(2319): a, c, g, t, unknown, or other
  modified_base (2322)..(2322): a, c, g, t, unknown, or other
  modified_base (2569)..(2569): a, c, g, t, unknown, or other
  modified_base (2608)..(2608): a, c, g, t, unknown, or other
  modified_base (3157)..(3157): a, c, g, t, unknown, or other
  modified_base (3489)..(3491): a, c, g, t, unknown, or other
agcnccgcagcggggaatntgcagtaggtctgccggcgatggagtggtgggctagctcgccgcttcggctctggctgctgttgttcctcctgccctcagcgcagggccgccagaaggagtcaggttcaaaatggaaagtatttattgaccaaattaacaggtctttggagaattacgaaccatgttcaagtcaaaactgcagctgctaccatggtgtcatagaagaggatctaactcctttccgaggaggcatctccaggaagatgatggcagaggtagtcagacggaagctagggacccactatcagatcactaagaacagactgtaccgggaaaatgactgcatgttcccctcaaggtgtagtggtgttgagcactttattttggaagtgatcgggcgtctccctgacatggagatggtgatcaatgtacgagattatcctcaggttcctaaatggatggagcctgccatcccagtcttctccttcagtaagacatcagagtaccatgatatcatgtatcctgcttggacattttgggaagggggacctgctgtttggccaatttatcctacaggtcttggacggtgggacctcttcagagaagatctggtaaggtcagcagcacagtggccatggaaaaagaaaaactctacagcatatttccgaggatcaaggacnagtccagaacgagatcctctcattcttntgtctcggaaaaacccaaaacttgttgatgcagaatacaccaaaaaccaggcctggaaatctatgaaagataccttaggaaagccagctgctaaggatgtccatcttgtggatcactgcaaatncaagtatctgnttaattttncgaggcgtagctgcaagtttcnggtttaaacacctcttcctgtgtggctnacttgtttnccatgttggtgatgaagtgnctagaattcttctatccacagctgaagccatgggttcactatatcccagtcaaaacagatctctncantgnccaanagctgtnncantttgtaaaagcaantgatnatgtagcncaanagattnctgaaagggnaagccagtttattagganccatttgcagatggatgncatcaccttgttactggnagancctcttgagtgaatactctaaattcctgtcttataatgtancgagaaggaaaggttatgatcaaattattcccaaaatgttgaaaactgaactatagtagtcatcataggaccatagtcctctttgtggcaacagatctcagatatcctacggtgagaagcttaccataagcttggcacctataccttgaatatctgctatcaagccaaatacctggttttccttatcatgctgcacccagagcaactcttgagaaagatttaaaatgtgtctaatacactgatatgaagcagttcaactttttggatgaataaggaccagaaatcgtgagatgtggattttgaacccaactctacctttcattttcttaagaccaatcacagcttgtgcctcagatcatccacctgtgtgagtccatcactgtgaaattgactgtgtccatgtgatgatgccctttgtcccattatttggagcagaaaattcgtcatttggaagtagtacaactcattgctggaattgtgaaattattcaaggcgtgatctctgtcactttattttaatgtaggaaaccctatggggtttatgaaaaatacttggggatcattctctgaatggtctaaggaagcggtagccatgccatgcaatgatgtaggagttctcttttgtaaaaccataaactntgttactcaggaggtttctataatgccacatagaaagaggccaattgcatgagtaattattgcaattggatttcaggttccctttttgtgccttcatgccctacttcttaatgcctctctaaagccaaaaaaaaaaaaaaaangacaaagcctcttaataaatttaatggaactatacatagaacagcagctcttcctcaccctttgcatacctttaatatttttccttcttaaattggccacagcaggggtcattcacactctcactgtcttgcaggaatcacaagaagtcttcatatgtgaacgtgccattcagttggtagttaagagcattcaacttcaaatatatagaagatatttgttttagtgcaaatccatgatggagtgcctcccttttccttttttcactttttgaaaaagatgttttgggtagtagtttaatatctcagggtgctctttctaacatagtaaaaaatgaagaaaaatgtttagattaaaactctgtagtctgatgacnttngaaccatccttgacccttaggcccaacctttccacagagaaatcacctctcttcctttgtcttttaagaactatttggtattaactagtttcagaattagtaaatgtgagattcagtcacataattatcagacattccatttgtcagaaatgtatttggctttttaaactcctttccacaaaagtttaagtctaatgaccttcttagagaagttgagcatgcctggcaagatcatttcatggaatangcagatgtttaaagttggatttttttttttttttttttngagtactagcaatgcacagggaccgtgttcttaggttcttagtctgtgaatctagcaataggcagtccagatttctgagtcgtactatggttttgccttgtcactgtgaggccctactaggtgtaagcattctctctgaattttaatttcctctcattaaaataggaacaaaatttgctatcctttagattaggagctgaagattcatttccctgggaatgtttcccatttagcttcaagtttcagctcaaacatcaccttctttctgactcctttcattcattcctccaggcagtaaggggctaccatagtactttgtttatgcctgtattatatgacatcactgtagttgcttgactgtttctcctactgttctgtaaacttattaatgggtgagaatctaattttactcatcttgatggcttcatgatccagcacagtgcctcacacaaagaactattgggtgggtggatggatggatggaggaatggagacagttggcttaaccagatcctatatacagattattactggctccaaaggatgagnagataagaccataagaattggatcaatgtaaatcctcacctgccctttgaagagccaataagggcatctttgtctttaaatacagcaaatgttattcagattttgtacttgtctatctgtttacctcagtgtagatgatatgaggatggtataactatgtaaattgtttttgaaaataatttgtttccccacaacttttgaaggttttatttgttgttgttattactagttcagtcccaaacttaccctttccttttcagagagctaatggccatgcttttcttcaaggaaagaataatttatttgaatgaagtgggatacttgcataacannnaaaaaaaaaaaaaaaaaaaaaaaaaaaaaaaaa

SEQ ID NO: 232 - DNA, 336 bp, Homo sapiens
gccactgcgaggccgttttagaaaactgtttaaaacaaagagcaattgatggataaatcaggaatagattctcttgaccatgtgacatctgatgctgtggaacttgcaaatcgaagtgataactcttctgatagcagcttatttaaaactcagtgtatcccttactcacctaaaggggagaaaagaaaccccattcgaaaatttgttcgtacacctgaaagtgttcacgcaagtgattcatcaagtgactcatcttttgaaccaataccattgactataaaagctatttttgaaagattcaagaacagcaaaaaaaaaaaaaaaaaaaaaaaaaaa

SEQ ID NO: 233 - DNA, 2254 bp, Homo sapiens; identical to SEQ ID NO: 55
  modified_base (268)..(269): a, c, g, t, unknown, or other
  modified_base (382)..(382): a, c, g, t, unknown, or other
  modified_base (873)..(873): a, c, g, t, unknown, or other
  modified_base (890)..(891): a, c, g, t, unknown, or other
  modified_base (1376)..(1376): a, c, g, t, unknown, or other
  modified_base (1383)..(1383): a, c, g, t, unknown, or other
  modified_base (1385)..(1386): a, c, g, t, unknown, or other
  modified_base (1388)..(1389): a, c, g, t, unknown, or other
  modified_base (1504)..(1504): a, c, g, t, unknown, or other
  modified_base (1766)..(1766): a, c, g, t, unknown, or other
  modified_base (1789)..(1789): a, c, g, t, unknown, or other
  modified_base (1794)..(1794): a, c, g, t, unknown, or other
  modified_base (1796)..(1796): a, c, g, t, unknown, or other
  modified_base (1798)..(1798): a, c, g, t, unknown, or other
  modified_base (1995)..(1995): a, c, g, t, unknown, or other

SEQ ID NO: 234 - DNA, 2254 bp, Homo sapiens; identical to SEQ ID NO: 55
  modified_base (268)..(269): a, c, g, t, unknown, or other
  modified_base (382)..(382): a, c, g, t, unknown, or other
  modified_base (873)..(873): a, c, g, t, unknown, or other
  modified_base (890)..(891): a, c, g, t, unknown, or other
  modified_base (1376)..(1376): a, c, g, t, unknown, or other
  modified_base (1383)..(1383): a, c, g, t, unknown, or other
  modified_base (1385)..(1386): a, c, g, t, unknown, or other
  modified_base (1388)..(1389): a, c, g, t, unknown, or other
  modified_base (1504)..(1504): a, c, g, t, unknown, or other
  modified_base (1766)..(1766): a, c, g, t, unknown, or other
  modified_base (1789)..(1789): a, c, g, t, unknown, or other
  modified_base (1794)..(1794): a, c, g, t, unknown, or other
  modified_base (1796)..(1796): a, c, g, t, unknown, or other
  modified_base (1798)..(1798): a, c, g, t, unknown, or other
  modified_base (1995)..(1995): a, c, g, t, unknown, or other

SEQ ID NO: 235 - DNA, 2073 bp, Homo sapiens
atcctaatttctaaagcaatcaggagagaaagcttttagaatggcacatcatatctcattgatgccaacatggttttttccatggttctgactttctgtgaaggcaccagcttgcaatatgccatcccgtttcaccttgcatgtgagacagcaaacaaaatccacaaatggtgtgaactaatatgctggctgctaccttgcataaattaatgatttgatcacacgggttcttcgtggggttacatctgtgaatagcctgttttccacatgtaaatttgtgccttacaccttgagttgtgtacacttgtaaactctttatgatcaactgttcccccttttgaaataagtgcagatatttatttaaccctcccttccccaccctctgccccacttccagccctctgaaagattggagtcaagcagatggaagaatgcagtggtgatagttgtcatgcgacagctggagaacgctgggcagcaccacaccctccaattcacactgccttctagttgtgccaactggaaccaccctttggctgtgctgcgaaatggaccccagtgttgttgtgggtgtgtcaaatcccctttcatcctcaagagctccctgcttcccttagattatttcaatacggtgatatccttatttgctagcagaaaagggactaacgtccccattcctcttttctgctgcgtcccactggctcagagaagcaaggcggtgcgcggttgggcagaaacctgggaggagtctccaagcccaattcacagcacacaacggcagtgcacacaaagaaatgacatggaaatagatgcaggcaggctggtccctgctgtgattaacgagaactccaagtacaaggccgaccacaatggatgctgcaaaaacgttgactggggcaaaggattttttattttattttttattttgttaattatgtttttaggggatgggaggtggtgtgtgtttttctcctcttggttttcatttgctcaagcacacaaaagggacttttgtttactctatcatgaacaaaggaactgtccacatactgtaaaccatgagcagtgttgttgttgtttttttaaacagtatatttggtggtctctttgtctgcttttatttccagttcgatcttctgggtttagttttgtctttaaaaagaattcaaaaaaagactgacaatgacagttttgagttggatagtgaaaaagtggagcctccataatcagtgtggttgccttcagacctgagtacttagctgagggtgggtgagagccctttgttccaaaagtccattagttttgctgttgtttaggagtaggtggttgttgttgtttttactttttttttttttggcttttgtaatggaatccatgttcacatcctgtgaactctgtctcctgaaaccctgaagtatttcctagaacctgaaatattgttttcttccttgaattttctctagaaatgcagaaattaggaaggtgatgggtctgtatccccctgcccccttctttcccatgcttgactcccgagagtactggcagtgcagcacccatcattgacgtaagcggctgtcttgtccagtgtttgtagagcatcactgcctcagctgttaaggagacctgtgtcaaaacttacatccacattcctacacccccacaacccatcacttctggtgttaaccctaaaatacccacatgtattgagctggtcttctgcatttaagtatttctccccagtttttttccccactgtgtgtggggggagggtccataaacccgagtgtgcctttgctttccacccttgctagacactggtagatgcaacaaactcagatttatatttgttgtaaagttgtaaaaatattgtgatgtcaccaattttccttccatctccacatcccctaacatctgattcacgacttaatgtatgttgtaagaaaagaaaaaagaaaagaaaaaaagggaaaaaagaaaagcaaggaaaaggctctttattacttaaaagtaataaaacctgactgttctatattaaaaaaaaaaaaaaaaaaaaaaaaaaaaaaaaaaaaaaaa

SEQ ID NO: 236 - DNA, 1114 bp, Homo sapiens
ctgaagcttcaagatggctgaccaggaccctgcgggcatcagccccctccagcaaatggtggcctcaggcaccggggctgtggttacctctctcttcatgacacccctggacgtggtgaaggttcgcctgcagtctcagcggccctccatggccagcgagctgatgccttcctccagactgtggagcctctcctataccaaattgccctcctctctccaatccacagggaagtgcctcctgtattgcaatggtgtcctggagcctctgtacctgtgcccaaatggtgcccgctgtgccacctggtttcaagaccctacccgcttcactggcaccatggatgccttcgtgaagatcgtgaggcacgagggcaccaggaccctctggagcggcctccccgccaccctggtgatgactgtgccagctaccgccatctacttcactgcctatgaccaactgaaggccttcctgtgtggtcgagccctgacctctgacctctacgcacccatggtggctggcgcgctggcccgcctgggcaccgtgactgtgatcagccccctggagcttatgcggacaaagctgcaggctcagcatgtgtcgtaccgggagctgggtgcctgtgttcgaactgcagtggctcagggtggctggcgctcactgtggctgggctggggccccactgcccttcgagatgtgcccttctcagccctgtactggttcaactatgagctggtgaagagctggctcaatgggctcaggccgaaggaccagacttctgtgggcatgagctttgtggctggtggcatctcagggacggtggctgcagtgctgactctaccctttgacgtggtaaagacccaacgccaggtcgctctgggagcgatggaggctgtgagagtgaaccccctgcatgtggactccacctggctgctgctgcggaggatccgggccgagtcgggcaccaagggactctttgcaggcttccttcctcggatcatcaaggctgccccctcctgtgccatcatgatcagcacctatgagttcggcaaaagcttcttccagaggctgaaccaggaccggcttctgggcggctgaaaggggcaaggaggcaaggac

SEQ ID NO: 237 - DNA, 703 bp, Homo sapiens
tcacttcacttttattatgaacaaacacaatctcagattagtacaattagcttcagagttgatattaatagaaattattccaaaattattcttgtcacaagtaactactatatcccacataaaaagggaaaaaatcccacccaatcacagaaaaggcatcctctgtatgtttccgtggcaatgcgttgtttatgtattctcaaattttgtctggctagttatccaccgcttctccaatggattcattcagtttcttggagaaccatatagactaatgacagcatctgggacacacggacgtatcaagttcatggtggacattcctattataaaaaatactcaggtcttgagaattcctgtgctgaaggatcccaaaatgctttctaaaaagcattagtcatgcctcaaaactgccctttgaggtaggtcagtattattatccccattttaacagaaggaaaactgaggcaccttatagttaagtgacttgcccagggtcacacagcaagtcagtggcacagtggttggagaggccctggccttaaccaccagcataacatggccacctcgcttttttaacctttcatgatgacctatttgagctacacttacagagaatacacccaagatactagcaaaccaaggagaaaattttccattttaaatgctacaaccatcttttaacccaaaaaaaaaaaaaaaa

SEQ ID NO: 238 - DNA, 1030 bp, Homo sapiens
ttttcttgagttacctcccgcagccgcagccgccgtgctcagcgcgagccccggagcccttgagcgcgaggcgcggagcccccggagcccccaaaccgcagacacatccccgcgccccagagccccggcctgcgcgcccagccgggcccgcgcgatgccctcagaccggcctttcaagcagcggcggagcttcgccgaccgctgtaaggaggtacagcagatccgcgaccagcaccccagcaaaatcccggtgatcatcgagcgctacaagggtgagaagcagctgcccgtcctggacaagaccaagtttttggtcccggaccatgtcaacatgagcgagttggtcaagatcatccggcgccgcctgcagctgaaccccacgcaggccttcttcctgctggtgaaccagcacagcatggtgagtgtgtccacgcccatcgcggacatctacgagcaggagaaagacgaggacggcttcctctatatggtctacgcctcccaggaaaccttcggcttctgagccagcagtaggggggctcggcctgggagtcggggggccccggtcaggccctgcccagagagctcctggttcctgaactgagctgcctctaccgtggtgggctgggcaggcatgtgcccccctagtcagagggcaccaacccacctactctgcccctgggtggatcctgggccggtcgtgttagggttgtccctctgggtgctggctggtgggatgggggagggtggggagcagctcccagcacccctgctgtgtggttcatcttttttttaggcccctgcctgtctgcccatctgcccctcacccacccgaggctctgcccaccgcctggacctgcccacccctgaaagactggcccctggctccccgcccctcggtctccacgtggtgtatggatctgtggtcattgtccctctgcagaataaagattgctcaggcctgcctggcaaaaaaaaaaaaaaaaaaaaaaaaaaaaaaaaaaaaaaaaaaaaaaaaaaaaaaaaaaaaaaa

SEQ ID NO: 239 - DNA, 3105 bp, Homo sapiens
  modified_base (6)..(14): a, c, g, t, unknown, or other
  modified_base (47)..(47): a, c, g, t, unknown, or other
  modified_base (50)..(50): a, c, g, t, unknown, or other
  modified_base (681)..(682): a, c, g, t, unknown, or other
  modified_base (1730)..(1730): a, c, g, t, unknown, or other
  modified_base (1893)..(1893): a, c, g, t, unknown, or other
  modified_base (2047)..(2050): a, c, g, t, unknown, or other
  modified_base (2052)..(2057): a, c, g, t, unknown, or other
  modified_base (2059)..(2061): a, c, g, t, unknown, or other
  modified_base (2066)..(2068): a, c, g, t, unknown, or other
  modified_base (2070)..(2070): a, c, g, t, unknown, or other
  modified_base (2075)..(2077): a, c, g, t, unknown, or other
  modified_base (2080)..(2082): a, c, g, t, unknown, or other
  modified_base (2086)..(2089): a, c, g, t, unknown, or other
  modified_base (2092)..(2093): a, c, g, t, unknown, or other
  modified_base (2095)..(2097): a, c, g, t, unknown, or other
  modified_base (2099)..(2100): a, c, g, t, unknown, or other
  modified_base (2688)..(2688): a, c, g, t, unknown, or other
  modified_base (2706)..(2706): a, c, g, t, unknown, or other
  modified_base (2714)..(2714): a, c, g, t, unknown, or other
  modified_base (2726)..(2726): a, c, g, t, unknown, or other
  modified_base (2770)..(2770): a, c, g, t, unknown, or other
  modified_base (2797)..(2797): a, c, g, t, unknown, or other
tttttnnnnnnnnnttttttttttttttttttttttttttttttttnttnttttttcttcattaaccctttattacaagtcacgctcttatagaagtatatgtggacttacgtgaaaaaatcaaatgtatccaagaataaaaaacacagcacataaagtagtatatgcattccagtgttcgcgccagagacggcgggcgcccaagtaaaagctcttctaaaacggcctgactggggcaggccgggtgcgaacggttccgggcctcaggcacagtgtgggggccgcctgcctcctccgcggcccggcgggcgggggcagcaccagctcctagggcctccgggccagcggcggaccccaggccggcccaagcccgacgccaggcagaaccctttgggcggggccgtatctggccctccggggacggcagtgacgacacccccagaaatgtgggcttcagggctggccacagggtaccctcagaagcccgcagcttagtcggcctttttcaggaagatctcgctcagaatcacccacacaggggagtccgtctggatcgagaggcgcagtgcttccagagggccgaaggctgggtccacctctccctctgccactcccttgtagaaggagccgatctggaggtagccgtcggggctccgagggtaccggagggtggcggtgcgnngccctcctgcagggcctccttgtctgactgagggttgtcgaagggcagcacctccacagacgtgttgaagagcttgtcctccgggtgctcgatgttcccactgcggaagaagaaccgctccagtcttagaggttggaagaagcggaagcggatgaagtcccccgcggcaggggtgaaggcccagaagaagtcctcgcgcaggtaggctttctccagggtgaagtgctggtatgtcttcaggctcgtgctcacctctgctggcgggttcacatgctccttccgcagcgcctgctttccaaagtctttgtccttcagtttctggatcttgccagccagcgaggagtgagtgcccacgtgctggaagagggacggtttgaagcggatccgcaggttggctttctgccggtcacagtgcttcgcatccttctcggggttgcagactttcacccacagaatatggtccaggagccagtcgatgggcttgtcccggtagaacatgagaatgaactctacaatcaggctcaggtccagcgacttgaacatcttaccaatgaagcccagctgggagaactccaggatcatccagtcctctgaaggctgctgcagtgcaaagttcttcatggtgctcaggtagttgggcttggccacgatgtcatcctccagctgcacgtagtagatgcctttggactgcgcgtacatcatgaggaagcagtaatcgaggttctgtttggtcctccacctgactctctccttggggtccccaaaggactctcggaggcgggagaagtcagggtagaagtggggggagggtgagatgacctccaggagcccagaatggatctccgtggggaacaaggccttgatgttctctgtcactgccgaagtgtactgtgagtcagtctcggcgatcagcaccacgatgaccgagtcctccttctcctgcgggctcagctcggagatgagcgagtgcagagtgtcagtcaggtacgagtgcacctcgcgccgcacgctcgggatgcccatcaccaccgacactccggtgcggccntggcccacgcgcaccgcgggctgcagactgctctccttggccagcaggtgtggcaggtgatggaagacggtgggcaggtgcagcacgtgccggtgtgagccgttccacggcttcaatcgggggtcctctgttaggcggccccaggtgcgattgccgtctccgntctcgcagcgcctgcctttctgacacggccctcttgatctcgtccagcaccaggttgagctccttggagcgcttgaggctctcctgctcagctgcgtgcaaccgatcgcgcagcgccaggaactcccgctggtaaacgtccacaacgtcgcctnnnngnnnnnngnnngccgnnncnagggnnnggnnnagannnnccnnannngnncctccagtgtgccagcgcacacatctgggtgtccacctctgcaatagctcattgacatctgttcttgtgcctgccacacgtgacatagctggggtcactctaaaattacactgacactaatgctcatggggagaaaaccaggggaattagccctcttccagtactctcccccaccgggggttattttatcctctgagaaggcatctgaagtggaaatacgatttccagacctaggtaggtggatcctaagcaagggctggaacagcctcagactgaatccgctccatccgttggcctccaaagcccactcttgctttttgcagcacacgctccctccagcgggtgggctacccaaggtcctggtgctagctcttcactgtccttgtagcggtcgctggttgctcaccctgcactggattcttagcctcacgatggccccggggggtggctgctgcagttccaggagcccacctcacttcattgctcaggtgagcaaatgaggttgagaaaccggccctggggctgctcaaggacagtcaacagcagcgaggggactagctctgaacgccctggtgcctgtgtctctgnagacctgtgctgcgcctngggcaccntgaagggtccgncatgccaccccagggggcccctgtcagaacctccagctgggccnaggcatgagggctgtaggtggatgggncagcacagaggtggggctgcccgacagtagagaggcaccaccagtctggcagggaccagtgagcaagaatgagatcaacaacctcctggtggctcggtgcccacagtccacgcagcaggacgctccaggcctctgccaggcgagtctctgaaaacctatgtggcctacaaggccttctgtttccaagtctccaagtttaagaagcctgaccgaactccctctacactcaggcagctcttccattccttgatccttggtggcttcacagaccccagagttgcgtgggatggcctcaccccaccagcagc

SEQ ID NO: 240 - DNA, 2596 bp, Homo sapiens
  modified_base (198)..(198): a, c, g, t, unknown, or other
  modified_base (411)..(412): a, c, g, t, unknown, or other
  modified_base (620)..(620): a, c, g, t, unknown, or other
  modified_base (1003)..(1003): a, c, g, t, unknown, or other
  modified_base (1211)..(1211): a, c, g, t, unknown, or other
  modified_base (1488)..(1490): a, c, g, t, unknown, or other
  modified_base (1496)..(1496): a, c, g, t, unknown, or other
  modified_base (2077)..(2077): a, c, g, t, unknown, or other
tttttttttttttttttttttttttttttttttgctgataagaattcttttatgttattccaataaaaaatacattcatacagaaatataacaatcttgcaaaaaacaatttcaaataaaatcttgtaaaacaaaattttacaaaaatcttacaaagattctttagataacagggtgcttccaaaaaaaaaaaaaaangaaatttcactaatagaaatttttttttaatttcaagcaaaaagtttctgcttgattgaggctcagttatcacctgaacagaatgtacttctttatgtacgtgctaattatgaaaatcacaggcattgacaggtacggtacccagccccacccaggcaaacagctccgacatgtttcgtaagtgagacaagccagtgcaagtttttttttttnntttttttttttttgtcttttgcttaccttcttgcttaatggaattgttatggctaagcacatagaaggccaaaaaaggagttttccaaacccagcaaatcaagtgcttggattctgaactgccaaaagaaaactgcacttcccctcttaagtaaaacgaaatgagtttcttaggtaaatgtattcatcagcccagataaaaaaaaaanccagttatgtgagcgttagtcactgctcatttccaggaagatcaaacaaaataccagcccagccagactcacatgtgtgtatatatatataaagcaaagagccacacccacaagccagcagctgggtgaaatatcagctgtccacgccgtggtatgccaattcggggaaattactccttggaaaaactggaagaatctacttgctggaaaaaatagcttcatctgcataaaaagtgttctacaaaagaatccctgtggttagcttactcttaggttagatcttctaataaggctgaaattcaaaatcaaaaccttagtgtgtccgagtccagcctgggttccagcattctgttcaggccacttctgaacggccgaaggtgccncattccagacctgcccatttgatggacagagcagacagcccggaacagattcaagcaagaaagtcctccgcacatcgttaaattaaagataaagcctctataaaagttaggttatggttttcatttttacctcctttatggccattttgaaatatttcttcacaggctgtggaattttctagctaaacattctagtttctccttaaanaaaatatttatatattatctatatatataatatatatatatacacacatacacatactgtacacacaaatatacatacacaagaattctgcccacttttttaaaaaagtagtatactttctgtattaccaacagatagctagacagatatgtgaaacttgtgccttttaagcaaatacattaacattgggggttttttaatacttctgtatctttaatatgtgtgaaaatgttacatattaaatacagccggtgtgtgatctatacaattgttgtgnnnggtctnatatgaaagtctcaaggtggcagaattggtcagatttttccattttcctgttttccattttaacactgacagtcaagttgcctaaagtgttgaacaaatactgacatgtaaagggagtttcactctatgtctttgtgaaggaggaccttaaagagattttttttctgtattatacgttgatacagtacactgccaggtgaaacaagagccttaataaagcatgcatcgcccacacccctgtatgagacccccacagaagggatcgcttgcgtaaggcaccattatgaaggtcaacagtgcattaacagctagaaaaccagaaattagtcctcaaggcataaataagagaaacatagctgcatgagaaaacagtttctaagcgttagtggttttatccacccaactgagaaaaattttaggttcttaagtctaatgaaacattagaccagcaattcccagccccagctttgtgacactcaatacgtgtccaatttcttctaagggcatcacagaattctccaaaaagttaattcaaattcagaatcatttaaaaataatcctgtgttgcacaatgcctttcnggaaggggagtgttacaaacttggaggggaaaaaaaattgtatattgccaggcccggatggctagggggtcactgtattagacagattggatcttagctgctcattaactggaatcagtattgcagtcctgacttaaaaatggaaaagcatatagttccccagaccatgcatgactttttgtattctaaggaaaagttaaattgttgtgttatatttgtaaatacacagcttatacaatgggttacaaatgagctatgttgtagcgtgtaaaacaagctacttgacacattgcacatttaatagctgcaccagacactaagagttcctctcacacagaaaagggggagagaggctctccctccccacaccactcgccactctggggtcctgagttcccacgcccaccctccaagattttccttctttttttgtttttgtttttttgtttttttgatttttctttttttttctaaggtgcagacaccccctccccccaaggaaatgattggtggtcatct

SEQ ID NO: 241 - DNA, 3118 bp, Homo sapiens
  modified_base (2)..(2): a, c, g, t, unknown, or other
  modified_base (123)..(123): a, c, g, t, unknown, or other
  modified_base (125)..(125): a, c, g, t, unknown, or other
  modified_base (2404)..(2404): a, c, g, t, unknown, or other
  modified_base (3084)..(3084): a, c, g, t, unknown, or other
  modified_base (3106)..(3109): a, c, g, t, unknown, or other
cngaggcagagtgctagcgggagcgcgagccagcaagaggcgcctgcgcgatgtccgggcccctgagcccgcggcgctgagccagccgggacggacatgcgcgggagggcgccgcggggcagncnccgctcctccgggggaatgaaagctactggttgattttaaagtgcctgggcctcacaggtttggagatgtcccagaataaggcacaatgtcaatagcaggagttgctgctcaggagatcagagtcccattaaaaactggatttctacataatggccgagccatggggaatatgaggaagacctactggagcagtcgcagtgagtttaaaaacaactttttaaatattgacccgataaccatggcctacagtctgaactcttctgctcaggagcgcctaataccacttgggcatgcttccaaatctgctccgatgaatggccactgctttgcagaaaatggtccatctcaaaagtccagcttgccccctcttcttattcccccaagtgaaaacttgggaccacatgaagaggatcaagttgtatgtggttttaagaaactcacagtgaatggggtttgtgcttccacccctccactgacacccataaaaaactccccttcccttttcccctgtgcccctctttgtgaacggggttctaggcctcttccaccgttgccaatctctgaagccctctctctggatgacacagactgtgaggtggaattcctaactagctcagatacagacttccttttagaagactctacactttctgatttcaaatatgatgttcctggcaggcgaagcttccgtgggtgtggacaaatcaactatgcatattttgataccccagctgtttctgcagcagatctcagctatgtgtctgaccaaaatggaggtgtcccagatccaaatcctcctccacctcagacccaccgaagattaagaaggtctcattcgggaccagctggctcctttaacaagccagccataaggatatccaactgttgtatacacagagcttctcctaactccgatgaagacaaacctgaggttccccccagagttcccatacctcctagaccagtaaagccagattatagaagatggtcagcagaagttacttcgagcacctatagtgatgaagacaggcctcccaaagtaccgccaagagaacctttgtcaccgagtaactcgcgcacaccgagtcccaaaagccttccgtcttacctcaatggggtcatgcccccgacacagagctttgcccctgatcccaagtatgtcagcagcaaagcactgcaaagacagaacagcgaaggatctgccagtaaggttccttgcattctgcccattattgaaaatgggaagaaggttagttcaacacattattacctactacctgaacgaccaccatacctggacaaatatgaaaaattttttagggaagcagaagaaacaaatggaggcgcccaaatccagccattacctgctgactgcggtatatcttcagccacagaaaagccagactcaaaaacaaaaatggatctgggtggccacgtgaagcgtaaacatttatcctatgtggtttctccttagaccttggggtcatggttcagcagaggttacataggagcaaatggttctcaattttccagtttgattgaagtgcagagaaaaatcccttagattgcaaaataaaatagttgaactctctgtcttcatgtggaaggtttagagcagttgtgagatgctgttatgctgagaaaccctgactttgttagtgttggaaaaaagtcttacaagtctataatttaaagatgtgatggtggggaggggaggatggggaagctttttatatatgcatacattacatacctatatataaacttgtggtataaccatagaccatagctgcaggttaaccaattagttactatcgtagagtaatatatattcagaataataaactcaagctggagaaatgagtcctgatagactgaaaattgagcaaatggaagaagatacagtattgtttagatcagaatcattaaaaaatatttttgtttagtaagtttgaagatttctggcttttaggccttttctattttgttccatttatttttgcaggcaatcttttccatggagggcagggtatccattctttaccatgggtgtacctgcttaggttaaaaatcataccaaggcctcatacttccaggtttcatgttgcgtcttgttgagggagggagagcaggttacttggcaaccatattgtcacctgtacctgtcacacatcttgaaaaataaaacgataatagaactagtgactaattttcccttacagttcctgcttggtcccacccactgaagtagctcatcgtagtgcgggccgtattagangcagtggggtacgttagactcagatggaaaagtattctaggtgccagtgttaggatgtcagttttacaaaataatgaagcaattagctatgtgattgagagttattgtttggggatgtgtgttgtggttttgctttttttttttagactgtattaataaacatacaacacaagctggccttgtgttgctggttcctattcagtatttcctggggattgtttgctttttaagtaaaacacttctgacccatagctcagtatgtctgaattccagaggtcacatcagcatctttctgctttgaaaactctcacagctgtggctgcttcacttagatgcagtgagacacatagttggtgttccgattttcacatccttccatgtatttatcttgaagagataagcacagaagagaaggtgctcactaacagaggtacattactgcaatgttctcttaacagttaaacaagctgtttacagtttaaactgctgaatattatttgagctatttaaagcttattatattttagtatgaactaaatgaaggttaaaacatgcttaagaaaaatgcactgatttctgcattatgtgtacagtattggacaaaggattttattcattttgttgcattattttgaatattgtcttttcattttaataaagttataatacttatttatganaaaaaaaaaaaaaaaaaaaaannnnaaaaaaaaa

SEQ ID NO: 242 - DNA, 2644 bp, Homo sapiens
  modified_base (8)..(8): a, c, g, t, unknown, or other
  modified_base (38)..(38): a, c, g, t, unknown, or other
  modified_base (45)..(45): a, c, g, t, unknown, or other
  modified_base (50)..(50): a, c, g, t, unknown, or other
  modified_base (89)..(89): a, c, g, t, unknown, or other
  modified_base (109)..(109): a, c, g, t, unknown, or other
  modified_base (254)..(254): a, c, g, t, unknown, or other
  modified_base (734)..(739): a, c, g, t, unknown, or other
  modified_base (1938)..(1938): a, c, g, t, unknown, or other
  modified_base (1956)..(1956): a, c, g, t, unknown, or other
  modified_base (2061)..(2061): a, c, g, t, unknown, or other
  modified_base (2066)..(2066): a, c, g, t, unknown, or other
  modified_base (2071)..(2071): a, c, g, t, unknown, or other
  modified_base (2103)..(2103): a, c, g, t, unknown, or other
  modified_base (2109)..(2109): a, c, g, t, unknown, or other
  modified_base (2156)..(2156): a, c, g, t, unknown, or other
aacggagngagccaatgagtgcgagatgttgagtgacnagcgtgntccanatggaggccctccgtgctagtacggcttgcggcttaagngccgccgcggtctgcggaangtcaactattcaacatggaggcggaggtcgataagctggaactgatgttccagaaagctgagtctgatctggattacattcaatacaggctggaatatgaaatcaagactaatcatcctgattcagcaagtgagctgtcaccacngactaaagaagagaaaactgcggcagagcaattcaaatttcacatgccagatttatgaagaaatggacttggaaaggaaattctaacagagaagagcttaattccggagaaatttaggaagatgtcttgttaacccttgatgtctagagattgggggctggtgaagggggtttggcttcaatgactggataatgatatctttcatgagagagattataagaagaagggcagataatatatgaataaagttcagccaaaaggatcaaatgagaataaaacgatttaaatatatgtacacacgcatgcacacacacacttagtcttgtaatttcaggccagaaattctcaacactattttgcatctgttttctttttctaagtcatgataatatagatgttctggtctatcataaaagaatgtttatgtacatttcagtcattcggtatgtggctttgtaaattaaagtataggcaaaacannnnnnttatacatgatatataatttcattttgtaaatgttgattgcacatgtggtcacattattgttgagactgcttttatgtgacctgtagtctcccacagaacctaaagtaataagctggcttttctgtgatagccacgtttgcgtatttctttccctatttcccttgcctgctaatgttgaacagcatgaacttgctttctgatgctgttttagactgtccctgttgtatctcaataatatctttgttttccttcagcctttattactataattgttcattctacatgaaagctaggaaactgaaattagaagagcacttatctgctacttgccagttttgcgtgagtgtgttatatgtatgtgtcaatttccctttaaaataactatttattttaaaataactattggcaataaggaaactgttcaaagtagaggcagatcttgatagaaagatgttaatcacagggttgtttataatagcaatatacatacacatttggctagtactaggtgaataggaaaataaatcatgctgtatgtatacaataagaggtcaagttgccaataaattattactgttaatgttctgggaaatgctgaaactatgctaagtgggggagagggaaagcaggtattgcagttttgtagtgaagattgggctttggagtcatatctgagatgtaagtagcagcttttaaattctagctatgaccctgtgcagatcacttaacttttgagtgtcaggatgtttggaaggacaagacaggaaagtgttttaatacagggttcagtatttagtaagccttcaataagtgatattacatacatgtaataaaaactaagcattgaaaggactaggaaaaatgcatcaaatgttagttctgcaggttatagaattatacttttatgtaattttaaaatttcagttatgaacatgtttgtccattaacaaacttataatagctgaaaaacagggttgtgagaacagcttcagttaaaattgtcctgtctagtttgaatatttcaagaacagaaagccttttttttttttttttttttttttgagacggagtctcactctgttgcccaggctggaatgcagtggtacgctctcagctcactgcaacctccacctcccaggttcaagcagttctctgccccaccctcccgagtagctgggattacaggcgcccgccaccncgcccggctatttttttntatttttagtagagatggggcttcaccatcttgaccaggctggtctttaactcctgatggtgatccacccacctcggcctcccaaagtgctgggattacaggcangagcnaccgngcctggcccccttttttttaattacagagaantaagtnacaccttagtatcagatattaattttcttcagtgttcaggcaattantatttagaaagctcttgtcatgagatggctctgggatgtgatgatgattgttgggattgaaaaaatggtagtatcatggagagatcataataaattcttagtattaaaagtggttttgctttcagttagggagaaaaattagattgtactatttttcctctatgatttccttcagttatcttccaaatgttgttttttccccacagcccccttaacattgttctctatgcacttctcaatacattttcatttgtttctcaagcctctttgtggatgactcctaaatataacttcttccactagctctagatccgtatttccaataaaatcccctacctgaatattcaagttaaacatgtccagaatacttactgattttattgttaatagccactattctgttgtctggaattaaaacctgtataactaatttgcatccctttatcttcttagtcaataaaacctacaatcctctttctaaaaaaaaa

SEQ ID NO: 243 - DNA, 738 bp, Homo sapiens
  modified_base (18)..(18): a, c, g, t, unknown, or other
  modified_base (20)..(20): a, c, g, t, unknown, or other
  modified_base (25)..(25): a, c, g, t, unknown, or other
  modified_base (624)..(624): a, c, g, t, unknown, or other
  modified_base (641)..(641): a, c, g, t, unknown, or other
  modified_base (671)..(675): a, c, g, t, unknown, or other
  modified_base (693)..(693): a, c, g, t, unknown, or other
ggcagcgccttttacggngncgtanagcagctcggccgagcagactgctgcggttcctgggtggcggcggcatggaggcgcgcttcacgcgcgggaagtcggcgctgctggagcgcgcgctggcgcggccgcgcaccgaggtgagcctgagcgccttcgcactgctgttctccgagctggtacagcactgccagagccgcgtcttctccgtggccgagctgcagtcgcgcctggccgcgctgggccgccaggtgggcgcgcgcgtgctggatgcgctggtggcgcgcgaaaagggtgcccggcgtgagaccaaggtgctaggcgcgttgctcttcgtcaagggcgccgtgtggaaggcgctcttcggcaaggaggcggacaagctggagcaggccaacgatgacgcgcgcaccttctacatcatcgagcgcgagccgctcatcaacacctacatctccgtgcccaaggagaacagcacgctcaactgcgccagcttcacggcgggcatcgtggaggcggtgctcacacacagcggcttccctgccaaggtcacggcgcactggcacaagggcaccacgctcatgatcaagttcgaggaggcagtcatcgctcgagaccgggccntggagggccgctgaccntgccggagataaaggatacagagagccccnnnnnaaaaaaaaaaaaaaaaanaaaaaaaaaaaaaaaacaaaaaacaaaaaaaaaaaaaaaaaaaag

SEQ ID NO: 244 - DNA, 1128 bp, Homo sapiens
  modified_base (26)..(26): a, c, g, t, unknown, or other
  modified_base (28)..(28): a, c, g, t, unknown, or other
  modified_base (269)..(269): a, c, g, t, unknown, or other
  modified_base (592)..(592): a, c, g, t, unknown, or other
  modified_base (902)..(902): a, c, g, t, unknown, or other
  modified_base (971)..(971): a, c, g, t, unknown, or other
  modified_base (1009)..(1009): a, c, g, t, unknown, or other
  modified_base (1040)..(1055): a, c, g, t, unknown, or other
  modified_base (1057)..(1059): a, c, g, t, unknown, or other
  modified_base (1061)..(1061): a, c, g, t, unknown, or other
  modified_base (1063)..(1063): a, c, g, t, unknown, or other
  modified_base (1065)..(1065): a, c, g, t, unknown, or other
  modified_base (1069)..(1069): a, c, g, t, unknown, or other
tttttttttttttttttttttttttntnttcaaaacagtttattttattttatttttttttttgtcagacaaacacattgatttctggaccacagtagaggatggaaacctttcacaaacttatttatttgaaaatacaaatataaaattatactttccacatctgtgatgtgagagactgccatccacatagtaattttttacaacagggctttaagaaagccacacacaaagacctgaaagatgcttgagatatatatatagatagntacatatatatgtatatatataaaaaaaatactcactaccaaagttctcatcagtttcatactaaagtataaaagtaagggtgaggtcagccacagtgctagggaaagttttatttagatacatttatgtccacatgaaacgcttagacttgcatcctattacatatggaattcggagtttacaatacaccatgaacggcagattggctagcccacgctacttaagaggacactcacagattccacatgggatggtacattatgtacagaatacagtagtagagaaccttcgagggaggctctggaacttttgtctctcagcntccggccccctcccccatcatgcccctgcctcccggaactgaaatcctgtctgagacaatacattctgattatttgatagccaggtgtttggattaaggttgcccccctgcaggtccccgacaagagggatggattttatttatatgtttttgtgttttagtttacttacttttttttggtagaaaaaaaagaaagaaaaagaaaacaaacatattacagtattaaagtattgcttaacttccagcgtctccttgtgtagtgtctgtgcccaggacggggctgagctgacgtctgctagttttctgcttnggggtgagggtggggaaacccgccagtgtctttcttcaatgtgcttgcctgcagtcagtccctctgctntcccactgtctgccttccttggaagatagcctggcttncgaagcacattcaagaaaaaaaaaaaaaaannnnnnnnnnnnnnnncnnncncncnctcnccctctgttcctgcgtgccacttgcaaccaataaagagaagtatgagttagtgtttctt

SEQ ID NO: 245 - DNA, 2758 bp, Homo sapiens
  modified_base (74)..(75): a, c, g, t, unknown, or other
  modified_base (79)..(80): a, c, g, t, unknown, or other
  modified_base (82)..(87): a, c, g, t, unknown, or other
  modified_base (90)..(92): a, c, g, t, unknown, or other
  modified_base (95)..(95): a, c, g, t, unknown, or other
  modified_base (99)..(99): a, c, g, t, unknown, or other
  modified_base (109)..(111): a, c, g, t, unknown, or other
  modified_base (803)..(803): a, c, g, t, unknown, or other
  modified_base (944)..(950): a, c, g, t, unknown, or other
  modified_base (952)..(952): a, c, g, t, unknown, or other
  modified_base (996)..(996): a, c, g, t, unknown, or other
  modified_base (1329)..(1329): a, c, g, t, unknown, or other
  modified_base (1392)..(1392): a, c, g, t, unknown, or other
  modified_base (1399)..(1399): a, c, g, t, unknown, or other
  modified_base (1411)..(1411): a, c, g, t, unknown, or other
  modified_base (1430)..(1430): a, c, g, t, unknown, or other
  modified_base (1627)..(1627): a, c, g, t, unknown, or other
  modified_base (1732)..(1732): a, c, g, t, unknown, or other
  modified_base (1876)..(1876): a, c, g, t, unknown, or other
  modified_base (2065)..(2065): a, c, g, t, unknown, or other
  modified_base (2255)..(2255): a, c, g, t, unknown, or other
  modified_base (2261)..(2262): a, c, g, t, unknown, or other
  modified_base (2264)..(2264): a, c, g, t, unknown, or other
  modified_base (2342)..(2342): a, c, g, t, unknown, or other
ccgagttttttttttttttttttgggaaaccataaagggtcgggcactttagttttggttcacatgaatagcanntttnntnnnnnnttnnnttntttntttttttttnnntttaactgatatattttttatttattaatgtaggctaaacaagcagaagccatcagtaagagacaagaggaaagaaacaaagcatttattccacctaaggaaaaaccaattgtgaaacctaaggaaggtaatgctttctatgatgtaaaagtctttattaattaggaaaagtaaacccataataaatttgtctgaatctttttaagaaacagttgtatcttttcatcagttctcttagcatttcattaattactaatcctaaggacaagggatggctgagataatttataatttagaggcagctaatgcctatttcagtgcaaactggattgacagtcctctcctgacctctggtctgtgcttggaaaagactctttgttgtgaaagatacaaacccagggcagccagtgcatcttctgtagaaatgcaagaagatccctgagctctgctgtcatgcctctcaaagaggaattatcagaagttgtactttttcttctctttatgtgatcttggcttagagtttggcttctatatcggtaacatggatttctcatcaccttagactaaaggatgctgacaggtcttattcaggagctattagtgcgaaagtgattgtggtttttaaatggcagaaatcactttcgcactaacctagtatttaaaagacactaagagaaaacattgtcatgccnatttcttctgatgcatcctcttctgcatttttttcccctgtggtaacacttatcctcttcctaaagtaaccctccaaagtgaacagtgacacactgaagggagagggctcaccagcaatattgtacatagactgggtcagnnnnnnntntaatacattattattttaatatattgcttgttaatagctttaanaatactacattctatggtagattattggttatataaaaggtagaaatgtcataagtattataatttccagtctgtaaaacctgtcagttgagtgctttgaaggtactcaatatactcaatagctagttaccctaatttagtttctccacacggtggaggctttaacactctgtgcttctcaggttgctgggtagtttgatgttttatcttatgattcttttatgctgtgatcctgtactttgaatggtaagaaaaagttgcattctttttcactgcttcctttctctattttgttcacacttttggcattgattagatagttggcttctattnagggggacttccacacactctcaaattattgtctttattaccaaaatgttgttaaatataccnaaaatcntgttaaaatacntattaattagtcattcatngaattaatattcaatgaattaatctaacattaaatgaattcattgaatattcaattaatattgaattaatatttggaaaactttaaattttcgttttgatattagaggaagtagattttgacctctagcttagggttagctgattaaacttattgagaagggatacatgtaattttaaattattttaatgtgcaagntggaaaataatgactcagaagttccaaaatatggaaaagaatgtaggtaaaataatttagtctgaagtaggatttaaggaaatagtcttaatatagttgaatccngtaattggttcaattatgccatttatgccatttttatgtatacttgtactaatatataaagtattttatgatttgttttatcttaatctgaagaaatttctaactgctttaggcaagtgtttttatattttatactgtgatcanctttcaattattcaattataagaatactctgaagttaactgccttaaacatatattctttgttaaacatatattctttgttttacttggtaaaatctaaagtattacatgtgttgtgcttttaatttgtctagcttctactgaaactaaaattgatgtggccagcatcaaggaaaaggttaagaaagcnaagaataagaaactgggagctcttacagctgaagaaattgcacttaagatggaggcagatgaaaagaaaaagaagaaaaaaaagtaacatacccaaaactccttgactagaactatctccttttgtaaaggattttgagatatcaggcattagttgccttatttgtgagaaattttctgagggctttttntttttnngntggtggtggttgttcatagaagagtgttctttataaattatattattattgtattttttgaaaaatttatactagaangtggtatatatgtctttgtatacattacgaccattgtgattatccattaaatccagtgtctgatgctattggttagtaatgatgtcccagcatttgatgttccctctctaatgataacaagtaaatatttaggtttatcccttttgaaagtttggttttacttttaacatgtcatgaacagaaaattaaggcctgtaaaatcagatccactagctactcctctgttctgaatctggtgaagtagtaaaccaaaaagacagggaaaaccatatatttagagtcgaagcagcatgcaaaaaataataatgtttttaactaatgaaggctactggagttacttaagaaatcacccttaaaaaatggttgcttttactttgtttaaacccccccctttgcttcatatttggccaagggaa

SEQ ID NO: 246 - DNA, 732 bp, Homo sapiens
  modified_base (8)..(15): a, c, g, t, unknown, or other
  modified_base (35)..(39): a, c, g, t, unknown, or other
  modified_base (41)..(43): a, c, g, t, unknown, or other
  modified_base (81)..(81): a, c, g, t, unknown, or other
  modified_base (706)..(710): a, c, g, t, unknown, or other
  modified_base (712)..(715): a, c, g, t, unknown, or other
  modified_base (717)..(717): a, c, g, t, unknown, or other
  modified_base (719)..(726): a, c, g, t, unknown, or other
ctctacannnnnnnncttcagctgcattctaggannnnnannnactactgagctgcaaatctatgctaagcatataagacnatgactgaaagggaaaaaaatttttttaattacaaactcaattcatttggtgcatttcaaaggtgcaatacttttcttcatttatcagtgaaagaagttagaaattaacttcccaaaaaaatcagcaaatggcaaacaaatgtccttgaaagtcacagtcacatatagtgcgtcctagaaaagaggaggggcaagatgggctccacccactttcatgagtttcatcaaatactggatctactcaagggtggagagaaaaggcaactttcaaaaaggagtatgttattaaatgaggcatttactatactccttcctaagagcaccagatggggaacatgttttctaaactagatctaggaagtggaatgtggaatcaatccgtcctcctccccttaagggctaaccactggttaatgaattaaaaaaacaagactaaaaaacaaaccccacacacactcccccccaaaaaaaagaggagggaaaaaaacaaaacaaaacactaagatgtcccagattactctccagagtggaaccagggagcagcttcaacaattccaattagtctgttacagagtcatccacaagcatgccttgcttttaaacaacaaaaaaaaaaaaaaaaaannnnnannnnanannnnnnnnctctct

SEQ ID NO: 247 - DNA, 1258 bp, Homo sapiens
  modified_base (140)..(140): a, c, g, t, unknown, or other
  modified_base (142)..(142): a, c, g, t, unknown, or other
  modified_base (146)..(146): a, c, g, t, unknown, or other
  modified_base (404)..(404): a, c, g, t, unknown, or other
  modified_base (775)..(775): a, c, g, t, unknown, or other
  modified_base (1088)..(1088): a, c, g, t, unknown, or other
  modified_base (1163)..(1163): a, c, g, t, unknown, or other
aaggcgattaagttgggtaacgccagggttttcccattcccgacggttttaaacgccgggcaattaattgtaaaacggctccctatagggcgaattgggaaccgggccccccctcgaagtttttattttttttttaaatntntttnttttttttttttttttttttcttttaaaatggcttttattgagacacttgtagggattctgcaacatttccagttgggaatctttatttccaactcttagggtggctaaacccttttctgaatgccaaaaggcacactctcaccaccttaatgaggaaacacacttatctgtgtctgttccgatatccaactgggacctggaccccaagccccgtggtgtcttgtacaagtctcattagtcctccacgtacaactcanaagcctgttaatcagggagggtaatttccaaataaatgtgagctggcctaaatccagctggttatttctgatttggtaatctgtagtatcttaatttggggacatcctgtcctaagttttggctggtgcatgtagaacttataatctacctgtataacaacagatgcaacatagctccgttccagccccaaattccttaaaggttctagtctactcttgcacttcttcctgtactgttgttgagaagcttacattttagggagaggctggtcaaatctctactctctggtaacagcattaacaagagtctttcttttggaaacagactcagaagttatggacatcagccacttcagacttctttaggccantatccttgaggtgactgaccagcctcctcatggattggagtttcccatcattgttttaattgctggaaatgttggcctaattctgcttccttgtaactttctgctttttagtacaagttctcttgggaatctacgcatggtaaaaataccagctccttccatctttacagccctgtcagtgctgtgctcttcaaagcctttcccttaatagcaagagggccaagagtggcaaatagaggcagagccgcctgcactacagttgttcccatcgtaaggtgaaaacgaacgtttaacttcatctagaagaaaaaancaaacaaaaaacccatcaggctattaagattctgcttgcaaattaatgccaatccatgtttacattttttttttnatcattgagacatttacatatatatgcaggctctgctccttaacaaaaggtgaactgaaaaactcaagggtgtttgtttttcagttaaaaaaaaa

SEQ ID NO: 248 - DNA, 1718 bp, Homo sapiens
  modified_base (35)..(37): a, c, g, t, unknown, or other
  modified_base (39)..(39): a, c, g, t, unknown, or other
  modified_base (41)..(41): a, c, g, t, unknown, or other
  modified_base (43)..(58): a, c, g, t, unknown, or other
  modified_base (61)..(61): a, c, g, t, unknown, or other
  modified_base (63)..(63): a, c, g, t, unknown, or other
  modified_base (65)..(66): a, c, g, t, unknown, or other
  modified_base (69)..(71): a, c, g, t, unknown, or other
  modified_base (74)..(76): a, c, g, t, unknown, or other
  modified_base (116)..(116): a, c, g, t, unknown, or other
  modified_base (183)..(183): a, c, g, t, unknown, or other
  modified_base (223)..(223): a, c, g, t, unknown, or other
  modified_base (233)..(233): a, c, g, t, unknown, or other
  modified_base (240)..(240): a, c, g, t, unknown, or other
  modified_base (273)..(273): a, c, g, t, unknown, or other
  modified_base (314)..(314): a, c, g, t, unknown, or other
  modified_base (1094)..(1094): a, c, g, t, unknown, or other
  modified_base (1691)..(1691): a, c, g, t, unknown, or other
  modified_base (1696)..(1696): a, c, g, t, unknown, or other
  modified_base (1699)..(1699): a, c, g, t, unknown, or other
  modified_base (1715)..(1716): a, c, g, t, unknown, or other
ggcaggaccagtggggcccaaatcttgctgctctnnnantntnnnnnnnnnnnnnnnnagncncnnctnnntcnnnctgccctggagaaaggtagggtgtgctgggcctgcccctngcaaatgggattcaccagtttcatttatttgactctactgccacagtgaaaagagcaaacagctatngggttgcaaacctcctttgacattaggaaatgttgacttngtaacaatanaaacttnggtcctagaaagacacggttgtcctgggagttngtagtgttaagttgcaacaacaacaacaaaaagcaacaaanccagcttaggataacactttttgttgcttgttcttaaagatgtctcactatgattaaaacccttttcattaatgtagtgaaagccacacaggagttccttcttccaggaggagaataccaagcacatcactttctctctgcatcagtgatgtcaaatacgcatcagaaaatgttcaggttttaggagctgtcctaggtgctgtttcatcattggaagcagtgagaaagagaagcactgctgcttgtctggatataggctgaggatgattgagagaagctgtgggaactgacacaagggtctgcataggtcatcctgtgaccctggggactatgttaccaactgacagacagatctttcactgtatcctagcagggcaggtagtccaccaagaaatgtgcttattggattgggaggtgtttatttgtagtctgctgtaacacgtgtgaaagagcaggagcgtcatcagcatatgacttgcgctggtcatccggtaaatggatgtgctgtagtcccagtgctaatcatttctctccttcacagtgggtggaagtttagggttaaatgtcctttgaatgtcacctggtgagtccttgacaccttaggctcttcagaaacaatggttttgttgaggatggggaacagggaatgccgattttatatacatggtacacagagaggggtgtcacttcagaaaatcttccagcatgttcttcagaatattaatttatatgcgaggtgaggttgggaatgaaaagaacaggtcagcacttttttttttncctagaacatacaaaagaacatggtggactttcagggagtgcaatggaaggtgaatatttccttaagggtccccgagaaatgggagtgaggggaggggacacaatggctttttgagcttacttttaccttctgatactagtcaaggtccagaaccagccaccagccaaatttctatctgggtgcgggccactgaaaatccttgttaaaaaccagatcacaaatctggggctcttggtcccattggagaaggaaggaagagcctcaaaataagtgtgcacccatgcacatattcaggaacagcttgtttagtctttacactttgcctgaaagttgcttctcctcgtccctttgtgtgcctgggtggcctcggccctgtgcgttggcaacgcaggatcaaatgtgctgcagcttttgcagaaaacaactcagaaacacaaaaccccccaacagctcaattattattttttcaatgttttcctacaagagccaagtagcaccatgtacagaagacgcctttttttttggaatattgaaatcgttctgcatgtaaaatatgggataatgacctgtttatattaaaattctgattaaattanctganaanaaaaaaaaaaaaaaannaa

SEQ ID NO: 249 - DNA, 1017 bp, Homo sapiens; identical to SEQ ID NO: 58
  modified_base (234)..(234): a, c, g, t, unknown, or other
  modified_base (238)..(238): a, c, g, t, unknown, or other
  modified_base (243)..(243): a, c, g, t, unknown, or other
  modified_base (301)..(301): a, c, g, t, unknown, or other
  modified_base (387)..(387): a, c, g, t, unknown, or other
  modified_base (406)..(408): a, c, g, t, unknown, or other
  modified_base (1001)..(1001): a, c, g, t, unknown, or other

SEQ ID NO: 250 - DNA, 1130 bp, Homo sapiens
  modified_base (72)..(72): a, c, g, t, unknown, or other
  modified_base (89)..(89): a, c, g, t, unknown, or other
  modified_base (139)..(139): a, c, g, t, unknown, or other
  modified_base (149)..(149): a, c, g, t, unknown, or other
  modified_base (158)..(158): a, c, g, t, unknown, or other
  modified_base (448)..(448): a, c, g, t, unknown, or other
  modified_base (486)..(486): a, c, g, t, unknown, or other
  modified_base (624)..(625): a, c, g, t, unknown, or other
gagtgtctttaaatgaggtgttctagacagtgtgctgataatgtatgtgcgggtgacctcttcgctatgatngtatctcttactgtttngttaaagaaatgcagatgtgtaactgagaagtgatttgtgtgtgtgtctnggttgtgatnggattcttnggggggggggaactgaaacatttgtcatatactgaacttatatacatcaaaagggattaatacagcgatgccaaaaagtttaatcacggacacacgtccgtttctgtagtccgtatgctctttcattcttggtagagctggtatgtggaatgccatacctctgaccctactacttacctttttactgacagactgcccacactgaaagcttcagtgaatgttcttagtcctgttttcttctgttactgtcaggaaactgagtgatctaatggttctctcacttttttttngttcttttagtgtactttgaagtatcaaatcttaactnggtttaaacaatacatattcctaacctttgtaaaaaagcaaagattcttcaaaatgacattgaaataaaaagtaagccatacgtattttcttagaagtatagatgtatgtgcgtgtatacacacacacacacacacanngagataaacacaatattccttatttcaaattagtatgattcctatttaaagtgatttatatttgagtaaaaagttcaattcttttttgctttttaaaaaatctgatgcttcataattttcattatattattccacatatttttccttgaagttcttagcataatgtatccattacttagtatatatctaggcaacaacacttagaagtttatcagtgtttaaactaaaaaaataaagattcctgtgtactggtttacatttgtgtgagtggcatactcaagtctgctgtgcctgtcgtcgtgactgtcagtattctcgctattttatagtcgtgccatgttgttactcacagcgctctgacatactttcatgtggtaggttctttctcaggaactcagtttaactattatttattgatatatcattacctttgaaaagcttctactggcacaatttattattaaaattttgaatccaaaaaaaaaaaaaaaaaaaaaaaaaaaaa

SEQ ID NO: 251 - DNA, 2110 bp, Homo sapiens
  modified_base (13)..(14): a, c, g, t, unknown, or other
  modified_base (19)..(26): a, c, g, t, unknown, or other
  modified_base (28)..(28): a, c, g, t, unknown, or other
  modified_base (493)..(493): a, c, g, t, unknown, or other
  modified_base (496)..(496): a, c, g, t, unknown, or other
  modified_base (526)..(526): a, c, g, t, unknown, or other
  modified_base (533)..(533): a, c, g, t, unknown, or other
  modified_base (544)..(544): a, c, g, t, unknown, or other
  modified_base (1142)..(1142): a, c, g, t, unknown, or other
  modified_base (1249)..(1249): a, c, g, t, unknown, or other
  modified_base (1257)..(1257): a, c, g, t, unknown, or other
  modified_base (1604)..(1604): a, c, g, t, unknown, or other
  modified_base (1733)..(1736): a, c, g, t, unknown, or other
  modified_base (1738)..(1739): a, c, g, t, unknown, or other
  modified_base (2069)..(2069): a, c, g, t, unknown, or other
  modified_base (2079)..(2079): a, c, g, t, unknown, or other
ttttttttttttnnttttnnnnnnnntnttgatgtcactgtggtttattaggtaaatacaaagtataggctcttgcattttttaaaaagcaaaaccaaagagattagaaaccaagtacacatatcctctttagaagagaaacataaatcagttttaacaattaggcacttaaaaatgtaaatgtaagacaacattatagaagtataaactatagttacactcctaaattcctcctgaaatgtttacaaacacaaaatcacaagcatggaaaacaaatttcctctttatcaaaaaaggaacctgaatttgaatccaatgtgataaaccaatgattaaggtactggtgggtaggaaaaaagagcttctgaaatttacatatttgattaaaatgtaagcatttcataaaactatcacaatagcatacagtagatatcataatgaaaaatatatgtcaggaaaataatgaatctagacttaaaattttactttacancanggcacttaacacattgaaacagtacagtanatttccnaaaagaatgcnattggctacctctgaaaccttgtaataatatttcttttgtgaatatacggtaacataaccatacattttgcagcattaatcattgcataggaggtaaattaaataatgaattctaacttggcaattagattagtttttgttcatcgtttcctctttttcttttaaaggacagttttaaataatttcacaataaagcactcttctcattcatgatttatttagaacacagcataatgagtaagaaaataaatcagaacttataaggtgtgtatctgtataaaaacttatctttgggtaacattgacatgattttcagtgtttgggtgttgaagtcaagagcacttcttaatagaagaaatattttcagcaactgagtcaaaggagttaaattattgcaacacaaggacactaaaaacaaatactaaaaatctttatatatataaatagaaaagccttcaacacatggcatataacttataatatgcttgatttaaacgtgtaaactcattaagaaactccttctcacacttccttacactacagaggctagtgcattaagattggcttaaagttttcatcagttttacagtgcaaaacnaaaacaaaaaagaattaagaaagaaatgttcaaactattcaaggggcaagatgtgaactttcaactaaaaaagaaactgcatgagttctgtcatgtaaaaaaaaccnagacaacnaatttggtgtttcaaagtaaacaaaacataggtcgttataaagggagacactaatgattgtgatcatgagaggtaaaaatgttctacaaattttctttgatcaaatggatacaaggttagaattacaagtgcctataatctgagcacattttacctttgggaaaggtttaaaatgcttttaaaataattcctttcacatgatactttcagattattggcaaacaacagaaaacaaatgcctttcaaaaacttgaaaacaggcttttaaaagtggtgtttgcattccaagtcataaagtatattgccacaagggggcactggtaatacaggaaataaccctaatgcantgtcatccacaaaccagagtagactcaacgctcactctcaaaacagccttcctgccacagcaaaacttgtttcccaagatgccagtaaattaagtaacaaattcacaattagttcaagtggactcaggnnnngnngctttattttcagatctagtggacaagctcaaaaactagaatctgagagaatttcatttgaaatgagttagaaaaaaaatgtggcatactctataggaattatatgttataggtatttcacagacaacctaaattacaggaaaagcttcaaacaggagcatagacttgaaaaaaacaaagataataagatatgtatcttaactggcaaagaacaggtaccccaaacatttatgatttcaaaggcaagatcatacttgttttatatcttcagtttatatatatatcatacttgttttatatcaaagtggcacattgggttgaagctcaacntttctttccnacatgtaaatgggttttactatttgttttat

SEQ ID NO: 252 - DNA, 1009 bp, Homo sapiens
  modified_base (517)..(517): a, c, g, t, unknown, or other
  modified_base (552)..(552): a, c, g, t, unknown, or other
  modified_base (803)..(806): a, c, g, t, unknown, or other
  modified_base (809)..(809): a, c, g, t, unknown, or other
  modified_base (837)..(837): a, c, g, t, unknown, or other
  modified_base (882)..(882): a, c, g, t, unknown, or other
ttttcttgagttacctcccgcagccgcagccgccgtgctcagcgcgagccccggagcccttgagcgcgaggcgcggagcccccggagcccccaaaccgcagacacatccccgcgccccagagccccggcctgcgcgcccagccgggcccgcgcgatgccctcagaccggcctttcaagcagcggcggagcttcgccgaccgctgtaaggaggtacagcagatccgcgaccagcaccccagcaaaatcccggtgatcatcgagcgctacaagggtgagaagcagctgcccgtcctggacaagaccaagtttttggtcccggaccatgtcaacatgagcgagttggtcaagatcatccggcgccgcctgcagctgaaccccacgcaggccttcttcctgctggtgaaccagcacagcatggtgagtgtgtccacgcccatcgcggacatctacgagcaggagaaagacgaggacggcttcctctatatggtctacgcctcccaggaaaccttcggcttntgagccagcagtaggggggctcggcctgggagtcngggggccccggtcaggccctgcccagagagctcctggttcctgaactgagctgcctctaccgtggtgggctgggcaggcatgtgcccccctagtcagagggcaccaacccacctactctgcccctgggtggatcctgggccggtcgtgttagggttgtccctctgggtgctggctggtgggatgggggagggtggggagcagctcccagcacccctgctgtgtggttcatcttttttttaggcccctgccnnnntgnccatctgcccctcacccacccgaggctntgcccaccgcctggacctgcccacccctgaaagactggcccctgnctccccgcccctcggtctccacgtggtgtatggatctgtggtcattgtccctctgcagaataaagattgctcaggcctgcctggcaaaaaaaaaaaaaaaaaaaaaaaaaaaaaaaaaaaaaaaaaa

SEQ ID NO: 253 - DNA, 1807 bp, Homo sapiens
  modified_base (72)..(72): a, c, g, t, unknown, or other
  modified_base (79)..(79): a, c, g, t, unknown, or other
  modified_base (94)..(94): a, c, g, t, unknown, or other
  modified_base (182)..(182): a, c, g, t, unknown, or other
  modified_base (324)..(327): a, c, g, t, unknown, or other
  modified_base (329)..(334): a, c, g, t, unknown, or other
  modified_base (676)..(676): a, c, g, t, unknown, or other
  modified_base (812)..(813): a, c, g, t, unknown, or other
  modified_base (815)..(817): a, c, g, t, unknown, or other
  modified_base (819)..(819): a, c, g, t, unknown, or other
  modified_base (822)..(822): a, c, g, t, unknown, or other
  modified_base (824)..(824): a, c, g, t, unknown, or other
  modified_base (1313)..(1313): a, c, g, t, unknown, or other
  modified_base (1317)..(1317): a, c, g, t, unknown, or other
  modified_base (1350)..(1350): a, c, g, t, unknown, or other
  modified_base (1360)..(1360): a, c, g, t, unknown, or other
  modified_base (1368)..(1369): a, c, g, t, unknown, or other
  modified_base (1371)..(1378): a, c, g, t, unknown, or other
  modified_base (1384)..(1385): a, c, g, t, unknown, or other
aatataatttcccataaaacatgaagtcctgttttgagttttattcccatgtgctatggtccctttggtcangtaccanggctctatttctgcntaagccccaagtggccatgctagcagccagccactatcgatttcctgtgaccgatgccattcctgagatcttcgcccatttccgttgnagggttgggactgtaagagcttgatgccacctctgtcacacatctcgccctgaagcaaacagggattcacactgctttagtaatgttgactcccaagaacccaagaaagtcaattaataatccaccaagtccagcctaaacnnnncnnnnnnccatacctgtttacatggaattacatccatgttaaaaaaaactaagacacaagaatcttaacattaaaacagaaagtagctcttcaagagtctaagcattacaaaattacatacactatttaaatctatcaagaattcattaaaaggtttagtgaaatgtttaaaagtttgattacatcagctataggagtaaagtgctaacttacaaagcttacagtttgtgacaccagtgataatgcatgcatactgctattttcaccaccaactggtgaaacaatgaaaagacagtttacttttactgagataccgaaatgagtcaaagactatattagccaatataantcctttgtttttagtgtgaaatactatggtagggcctaattaaaaataaaaacaatatggagaacagtaaaacagtcatcaagtgactctaagcttgtatttactctaagcttgtattaagcttgtattgactctnntnnntnttntnttttttttttttaatttctattcagggatccaagaattttagtaattattaactgagcagcagattgccactggactgttttaagatttactatcaccagtcttacatagatacataaattttaaaatctcacccatttcttcttataagactattagaagatttaacttgccacagactggtcatgctttgttattcttggacccctgctttttcccaaaccactacattcacctttttgctataccaaactggaggtggtaattcttagttgagtcattttacctaggggaccacggtacagcgataagtcactcaattactaccttatgattgacagttcacactggaatcaaaggtgaattcatgggagtagaggtgagatatcgttaggcaagtctacaaagagagatagatgggcatttattcatcacgctgaagtgaaactactgcacaatattattacatcaatagcatatatttactttngtangttacacgtaatgcatctctgataagataaatnaagagggctnccgggganntnnnnnnnnatttcnncagtagtttcgtgaataatgctaaattaagaaatatataaacctcaccgacatgttttttctcaccttcttgtaaggagcctcaagcattgcttcaatatcaatatcgtctgccattttctctaaacgcctgttccggccttcgggcgcctgtggtgctcgtgttcgggaagagattgctgctgctgctgctgctgctgccgccgccgccgcttctgttgctactgttaagcccctaggcccaggccgcggaaccgcccagcccgaatatcgggttccaaggacggctaggcccgagagaatctaaaaaaaacaatggaattagagaagcccacgcgggagagcaggacggcggcttcggcagctcaggatccacccctgcgacagcgtcgacaagctccctgaaatggcggccgcaagctt

SEQ ID NO: 254 - DNA, 898 bp, Homo sapiens
  modified_base (356)..(356): a, c, g, t, unknown, or other
  modified_base (670)..(671): a, c, g, t, unknown, or other
atttattttatttgcaggaggagttgaaacaaattttaagggagattttcattttccccctaaacatgaatcattcaagtaaaaccaacttaactatagaaatgtagcaaagtaaggggaaagcagcacaacaacccaagaggcaaaggctgggggggagaggtgggtgcagtccgcatataacatatgcataaatgccttatgattcacctgctcaggaccgcctccccagaaggcaagcacaaggacccattttaagaggatgtttccccccaaacatctgagaatgcttcaacttaaacagcttaaggttaaaaagacaaagaaaaaaaaaaagaaacccaaaaaaacccctngaaccacccagccataaccaccttccttaatcgatcataggagtttcttttcattttataaaaagattaataaaaaatattgaaaaaattttctcatatttgtaaagataatagaattcataagtttcttagaaaacagaccagacactgccctccagtttccaccccgttgctgggaggatcagcaggactagaaagtttgggatactggagctgctggtggagaacggggaagtccagcccagaagaaatcaggaaatagggctcaggggcacgtgaggtgtggtaaggagcaactccacgtgatacatggnngcgcagaaaaggggaacacaaggtggtcggaaaggccttaaactcctccttgacatacaaaaccggtttttacaaagatccaagcagtttggtcccaaactgaggtgaacacttcaaagtttattcacatgcttttgttttctctttcaagaatcaaagtttcccaaattaaatgtttctaatattactacatatgcctaaaaaaagaaaaaaaaaaaaaaaaagag

SEQ ID NO: 255 - DNA, 1936 bp, Homo sapiens
  modified_base (27)..(27): a, c, g, t, unknown, or other
  modified_base (220)..(220): a, c, g, t, unknown, or other
  modified_base (237)..(237): a, c, g, t, unknown, or other
  modified_base (253)..(253): a, c, g, t, unknown, or other
  modified_base (292)..(292): a, c, g, t, unknown, or other
  modified_base (300)..(300): a, c, g, t, unknown, or other
  modified_base (312)..(312): a, c, g, t, unknown, or other
  modified_base (329)..(329): a, c, g, t, unknown, or other
  modified_base (340)..(340): a, c, g, t, unknown, or other
  modified_base (342)..(342): a, c, g, t, unknown, or other
  modified_base (367)..(367): a, c, g, t, unknown, or other
  modified_base (740)..(740): a, c, g, t, unknown, or other
  modified_base (1223)..(1223): a, c, g, t, unknown, or other
  modified_base (1230)..(1230): a, c, g, t, unknown, or other
  modified_base (1234)..(1234): a, c, g, t, unknown, or other
  modified_base (1239)..(1240): a, c, g, t, unknown, or other
  modified_base (1242)..(1257): a, c, g, t, unknown, or other
  modified_base (1259)..(1263): a, c, g, t, unknown, or other
  modified_base (1265)..(1267): a, c, g, t, unknown, or other
  modified_base (1269)..(1274): a, c, g, t, unknown, or other
  modified_base (1277)..(1278): a, c, g, t, unknown, or other
  modified_base (1280)..(1280): a, c, g, t, unknown, or other
  modified_base (1290)..(1290): a, c, g, t, unknown, or other
  modified_base (1301)..(1301): a, c, g, t, unknown, or other
  modified_base (1305)..(1305): a, c, g, t, unknown, or other
  modified_base (1309)..(1309): a, c, g, t, unknown, or other
  modified_base (1316)..(1316): a, c, g, t, unknown, or other
  modified_base (1319)..(1319): a, c, g, t, unknown, or other
  modified_base (1321)..(1321): a, c, g, t, unknown, or other
  modified_base (1343)..(1343): a, c, g, t, unknown, or other
  modified_base (1348)..(1348): a, c, g, t, unknown, or other
  modified_base (1350)..(1350): a, c, g, t, unknown, or other
  modified_base (1359)..(1359): a, c, g, t, unknown, or other
  modified_base (1364)..(1364): a, c, g, t, unknown, or other
  modified_base (1370)..(1371): a, c, g, t, unknown, or other
  modified_base (1376)..(1376): a, c, g, t, unknown, or other
  modified_base (1883)..(1883): a, c, g, t, unknown, or other
gtgctttatggcgaaggatggagtttngctcttgttgcccaagctggagtgcaatggtgcgatcttcgcttactgcaacctctgcttcctgggttcaagtgattcccctgcctcagcctcccgagtagcagggattacagatggagcctcgctctgtcacccaggctggagtgcagtggcacaatctcgggtcactgcaacctccgccccccagcttcangcgattctcctgtctcngcctcccgagtagctnggattacaggtgcacgccaccaggcctggctaatttttntatttttngtagagatgggnttttgccttgttggccnggctggtctcnanctcctgacctcaggtgacccatccnccttggcctcccaaagtgctgggactacaggtgtgagccaccatgcctggtcccccacttgttgattttgcagaaaagatagctgtgttacaacctgtcctaaggtcaggtatgaatacttgtgcttctttcttggctccccaagccagagggcattcctatgcccaggtgagagagcacggagtgttactttggcagcacagtcagttaccagaggtaggaaaagcaaaggccaggcaggacatgaggggcccttgcactggctggttctccctgccttcaccaccctccaggtgaatgactgggtgaataatgattgactgaggaggtaatgaataatttatggacactgctggacctcagtctcctcatntgaaagatgagtggttggagaagtttaatggttttcaaatgctttttttttcagtcttcaaataagtgtttacgtagaagcaccatatctgaaacaggtgacagtggaccagtctgaatgaaatgagggttggcaggcctgagctccaaaaccttctgattgcccaagccctccttgtcttgcttggattatctccacacaaatggagaaactggacaaggtggtcatggaggtccctgaaagctcaaagactttctcattccaggattccccatgttcatatgccagcatggcatgggggtgctctgtagtcaagcagggtcctttggggggcttagggatggagccaggaaatggctctgggactcagcgggtgtccagagtctcatcagcagggtttctttactttcactgagtggctggtgcctgcacactgagttttgcaggcttactctcacagagtgagcttcctgcaggcccccnactgcancccntttcnntnnnnnnnnnnnnnnnngnnnnntnnntnnnnnnccnngnccctctcccnatgctgctgantggncagnctttctntgncncgctcgtggttgccacagtcancgctngntaaaattgntgatncagatnngcctncccagctgcgagtgctggcacgggaccagcagcccagacggtcactggaagtggttgggctgattattggcatcatctccattgtcctactcggttcttaaaggcatatggacttgcctcactcctacagcaaatgacggcatgggcaaagaggggcaacagacccaccctgaagacactcctcatctggttgacttggcagggttaagggaaaaagatgtgatgactaggagctgagagcttagtggttctgccagagctgcagagtctttgttggcctcagggtgggacctctcacatctctgtcagcttttcacagacaccaacctgttatgattcatttcacctgtcctgagcactagcaagaaaaattcgctgtagcttgtgatgtattattctggatttctcaactcattcatttgttcattcattcactataccattactgtctattataaggggggcacaatggtaggtgctgggaataaaaacgatgtttaacgtttnaaaaaaaaaaaaaaaaaaaaaaaaaaaaaaaaaaaaaaaaaaaaaaaaaaaaa

SEQ ID NO: 256 - DNA, 612 bp, Homo sapiens
  modified_base (51)..(53): a, c, g, t, unknown, or other
  modified_base (543)..(543): a, c, g, t, unknown, or other
  modified_base (546)..(546): a, c, g, t, unknown, or other
  modified_base (548)..(548): a, c, g, t, unknown, or other
  modified_base (550)..(550): a, c, g, t, unknown, or other
  modified_base (558)..(558): a, c, g, t, unknown, or other
tacggctgcgagaagacgacagaaggggcatctcgacatcgatacgacttnnnttttttttttttttttttgcttcaatacttctgccgctttggaaattgtaacagttaattactttgaatgttgctaaaaggacattttgtgtagggtcaagttatttttatatgagttaatgtgaaattgtaaatggaaatttttccttaaaatacaacacaatgatgtctgtataaatctgtctgtttagaatctgtgctgtgtaagggcattcgtactcatgctgttactgtacttatgcaccattcagacttgttagagtagatgtgggtttatgactgccaagtttgcccagtacagtagttttttatcactaaaagttggactcattgatggagtcctgtagtagtttcagtgttagatacagttttttccaccatacatctgtgcattttctctttaggtgactgtttaagaaatttgtgtgcatagttactcagtttttatgaactgttgtatcctgttaatgcatattgctctgtgactccngtnanancttacctntactgaccatacctaaataaagatttttattgtaactccaaaaaaaagtcgacg

SEQ ID NO: 257 - DNA, 1192 bp, Homo sapiens
  modified_base (155)..(155): a, c, g, t, unknown, or other
  modified_base (159)..(159): a, c, g, t, unknown, or other
  modified_base (513)..(513): a, c, g, t, unknown, or other
  modified_base (585)..(585): a, c, g, t, unknown, or other
  modified_base (649)..(649): a, c, g, t, unknown, or other
gtgaaccgaagtccttatattcccgggcttctttctcctctgggtaccagctccttactgccctgcagacaagcgtgccgtgcgtgcttgtggccaagggaaggaagagctggttgatccacagatagctccttcctccccgccccttccttttngttnggaggtcccaggatctgtgttcacagacatctgggggaagaaaaggagcaggaaactaccccgcacagagttaagcaggaaacaacaacaacatcatgcaaaaaccctgcaaagaaaacgaaggaaagccaaagtgcagcgtgccaaagagggaggaaaaacgcccgtatggagaatttgaacgccagcaaacagaagggaattttagacagaggctgcttcagtctctcgaagaatttaaagaggacatagactataggcattttaaagatgaagaaatgacaagggagggagatgagatggaaaggtgtttggaagagataaggggtctgagaaagaaatttagggctctgnattctaaccataggcattctcgggaccgtccttatcccatttaattaatttctctgacaattcaattatttnctgttattaatgttgccactgctttctgtttgtctgcactttcttgataaatatttgctatcgntttactccagtcattcgatgttgctgagatttacatatgactcttgtcaacatctcatcttttgacccaatcttattcatttaataagaggtctcattcatttgcatggaaaaatgctcattgtatattgcaaagtgaaaataacgagttgcaaaacagtgtatacatatatgtgtgtatatatgtacactttatttgtacatttctatgtgacataatgcaaaggaaagtgtctgattttattatacaccaaaggttaacagtgaatctctgtgtgatctctttttttttctttttgcctatctgcatcttctcacttgccaaaaaatgaatatatgtttatgtgtgtatattacttgtgtcacaaaaaaccctaaagtagacagtaaaagaacttgtcaatcgcctttggaaggcaatgaaacacttaataaactctcaataacagaagcgtaaaaatgaaatgtaaacctccaattacctctggatctcttagccagagtaataaactggtaattattacagataaaaaaaaaaaaaaaa

SEQ ID NO: 258 - DNA, 784 bp, Homo sapiens
  modified_base (519)..(519): a, c, g, t, unknown, or other
  modified_base (540)..(540): a, c, g, t, unknown, or other
  modified_base (684)..(684): a, c, g, t, unknown, or other
  modified_base (687)..(688): a, c, g, t, unknown, or other
agcggccgcccttttttttttttttttttttttttttctagtatgtgctaattatgaattttattaaggtttattcaatgtcacagaggaaagaacggtttgtagttttgcttacccgcagtgctggcaggtcacagctgtccaaccatgatccattcacatgctctggccccgtgcccctcgtcctcccacccctaccccacaggacaccattaagccagggctgggtaacaacatatgctcaatgcatcttctcaggtgagaaccaaactcgagccacaacagcaaagggggaaaaaggtagcaaagtaattatgtgctcccaaggcagtcatttagttgaatccataactggaaataaaaaggcatttatgaagtgtagtccgcagtctgaatgtggaaggtggaagatcacacatttactaagaaacactcaaaacatattttggttcagaattctaaaaaatcccgaattttccatgatcttcccaagacaaccaatgacccacttaaatttanggcaaaaacacccttgaatcnaggaatgtgcacatatgcaacagctaacatctggtaactctaataatgttccttatatgtttctgtgtttactatcatgaaccataggaagaagtactggaaaatttagtaagtgtggacagttaaaaacactggcccggcacngtnngcacgcctgtaatcccagcactttgggaggccgaggtgggtggatcacgaggtcaggagttcaagaccaggcataccctctacacttataaaaatg

SEQ ID NO: 259 - DNA, 865 bp, Homo sapiens
  modified_base (21)..(22): a, c, g, t, unknown, or other
  modified_base (24)..(30): a, c, g, t, unknown, or other
  modified_base (32)..(32): a, c, g, t, unknown, or other
  modified_base (35)..(42): a, c, g, t, unknown, or other
  modified_base (98)..(98): a, c, g, t, unknown, or other
  modified_base (114)..(115): a, c, g, t, unknown, or other
  modified_base (233)..(233): a, c, g, t, unknown, or other
  modified_base (388)..(388): a, c, g, t, unknown, or other
  modified_base (479)..(479): a, c, g, t, unknown, or other
  modified_base (498)..(498): a, c, g, t, unknown, or other
  modified_base (504)..(504): a, c, g, t, unknown, or other
  modified_base (514)..(514): a, c, g, t, unknown, or other
  modified_base (843)..(843): a, c, g, t, unknown, or other
  modified_base (845)..(847): a, c, g, t, unknown, or other
  modified_base (850)..(853): a, c, g, t, unknown, or other
gggtctctataatcaataacnngnnnnnnnanatnnnnnnnnataaagatattatatataaatataaatttacatatatatgcacatgtatatatagntgtacatatatgtgtnntatatatatacttaaatgtaatatttacaaaataaaactgtgatctcgtctagagaaaatgtattcatattacaaactgctcttccatatttatgtaccatattatacctttttattnttgttataattattatgggtatttctaattaatatgatgttgaaacctgtttggcaccttctggaagctaccaaaaaaatgacactccattgaagtgcttaaaagctgttctcataagaattctactggcctattgtaaaaaagaaaaaaaaaangaaaaagaagaaagacacaaagaaaataatctaaacaccaaaaactaaacacaattccaatcctttttctgtacctcacgcgcataaattngctgctcctattttttttnctgttnatgtgttttnatggatctaagttaaatcttttggcaatatataaaaatgtaaatagtaaactttatttattaagaatgtcatcttttttaatttatatttacacaattgttcatctaatttattttttctatacagttttaaatactcagacatattttgctgttcatgatatttttatcctgttctcatggatttgttttcccatactgttttctctgatctcaattacaggttggatctcacaaataataatgtcagagacagaaatattttgccactgttgattactatactttaaagttctatattatgaaaatatataatagcttgtacgcttnannnaannnntccggctcgatt

SEQ ID NO: 260 - DNA, 888 bp, Homo sapiens
  modified_base (130)..(140): a, c, g, t, unknown, or other
  modified_base (142)..(142): a, c, g, t, unknown, or other
  modified_base (208)..(208): a, c, g, t, unknown, or other
  modified_base (236)..(236): a, c, g, t, unknown, or other
  modified_base (263)..(263): a, c, g, t, unknown, or other
  modified_base (282)..(282): a, c, g, t, unknown, or other
  modified_base (289)..(289): a, c, g, t, unknown, or other
  modified_base (321)..(321): a, c, g, t, unknown, or other
  modified_base (345)..(345): a, c, g, t, unknown, or other
  modified_base (354)..(364): a, c, g, t, unknown, or other
  modified_base (366)..(366): a, c, g, t, unknown, or other
  modified_base (839)..(839): a, c, g, t, unknown, or other
  modified_base (841)..(851): a, c, g, t, unknown, or other
  modified_base (853)..(854): a, c, g, t, unknown, or other
  modified_base (857)..(861): a, c, g, t, unknown, or other
  modified_base (864)..(864): a, c, g, t, unknown, or other
  modified_base (866)..(866): a, c, g, t, unknown, or other
  modified_base (868)..(869): a, c, g, t, unknown, or other
  modified_base (871)..(872): a, c, g, t, unknown, or other
tttttttttttttttttttttttttctatagtaataggttctcattttattcaataaactataatctaccattatcattattaatttggatgctcacatcatcccaaatttggccactggaagccccttnnnnnnnnnnnangtgtcctttgacatgtccctgtcattttttaaatgcttccttgctttctggcaccacacagcactntgggctcaccttgtacttccctaccccngccttagcatcagccatttctacaagnagctctgagtccttttagngaagggnggtatttataaaccacaatctggatggtttgnggatattgcacagcattcagtcanaagccatgnnnnnnnnnnntnggaaatgaagcgacatttattgaaacttgtattagtcaagcaacttaatgctaggctaagttgcagtgagtaataatccctaaccccagtgacagtgcagaaaaagaagggtttcatatgtggagtgtgatgcatgtcaatgggagtttcctccacctggtgactcaggtatccaggcacattcatctctgcaggtctgccatcttgacacgaggtcattgcagaaggagagagggtgtagagtcatgccagttcttaggtgctcctgacaaggagatctgcagcactctgctcacattcctgttttccagaactcagccagtacccagtgcaactgccaaagagtcttgcaggacggagtcttggccgcagactgagcctgtacctcacccgtctcccaccaactcttggtactggacgcagtcatgctgggcagctctatggaggcctggcgggctagcttgggggtctgncnnnnnnnnnnntnncannnnnggngngnngnntgggcctgaggtctcc

SEQ ID NO: 261 - DNA, 1001 bp, Homo sapiens
  modified_base (17)..(17): a, c, g, t, unknown, or other
  modified_base (471)..(471): a, c, g, t, unknown, or other
  modified_base (475)..(475): a, c, g, t, unknown, or other
  modified_base (484)..(484): a, c, g, t, unknown, or other
  modified_base (490)..(490): a, c, g, t, unknown, or other
  modified_base (501)..(501): a, c, g, t, unknown, or other
  modified_base (535)..(535): a, c, g, t, unknown, or other
  modified_base (679)..(679): a, c, g, t, unknown, or other
  modified_base (985)..(987): a, c, g, t, unknown, or other
ttttttttttttttttntggaagtaatgtctgtttattgatagaaaacaggccacgtccagagaggcccagggccaaaacctccttctggaaggccgaagtcccacagtgccggggagcgcaggagtcagctcggctccgtcttgccagggctggggggaccctcatcctcacccgcttccggagctgcagtggatgtgggggcccctgcagcctccagaaccagttccagggccccctcgcccgccacacggtgcacctgctcgcctctggccgtcaggatctcttcgatatttctcttcccattcaggtccgagaaccagcccaggttgtcagcgatgatatggtggttctggcagccggggcaggtcacaatgaccacgccttggtgataggccagcttggagatgcgcttggaggacctagtcccgcagaccttgcaggtgtagacgagctggtagtgcgccgcctncacngcgccccangagccnccgcgggcccnggcccctgctcggagcttgagcgccgccagcccnaggcccaggcccgccgcctccccgcgacctctggacgggccccgcggccccacagccgcctcaggcagggcgcccggggctgcacgcgactcagcaacctcggcgcgccgcgcagcgcagtccgcagcatcccgctcgccggcnccgtccgccctgccccggccctgccccggccccgccccgccgccatcttggaagtgggcgccgggcggaagcggcgttcttgggcttccgtcttccgggtcgggggcgcgctgcgctatgccgccccctggcggcctgagggggccctgcgtccacgtgcagctcgcaccccgaggacaccgcgggccgcagcgaggagggacggccgcggggctgcgcgcgagtgtccgagcgggaatgcgggtcacccgtgctgtttatttacgcagctgtgttttctaacactaatacaatgcatgcatgtannntgtgttacatggtg

SEQ ID NO: 262 - DNA, 867 bp, Homo sapiens
  modified_base (2)..(2): a, c, g, t, unknown, or other
  modified_base (6)..(6): a, c, g, t, unknown, or other
  modified_base (134)..(134): a, c, g, t, unknown, or other
  modified_base (158)..(158): a, c, g, t, unknown, or other
  modified_base (495)..(495): a, c, g, t, unknown, or other
  modified_base (569)..(572): a, c, g, t, unknown, or other
  modified_base (609)..(609): a, c, g, t, unknown, or other
  modified_base (618)..(618): a, c, g, t, unknown, or other
  modified_base (634)..(635): a, c, g, t, unknown, or other
  modified_base (639)..(639): a, c, g, t, unknown, or other
  modified_base (645)..(645): a, c, g, t, unknown, or other
  modified_base (670)..(670): a, c, g, t, unknown, or other
  modified_base (679)..(679): a, c, g, t, unknown, or other
  modified_base (692)..(692): a, c, g, t, unknown, or other
  modified_base (702)..(702): a, c, g, t, unknown, or other
  modified_base (710)..(710): a, c, g, t, unknown, or other
  modified_base (724)..(728): a, c, g, t, unknown, or other
antganttaaagagatgaatttattggtaaatagataaaattaacacctattttaatatatccaaaccccttccttatatatattaggtaaattaaaagaaaaaaattatcaaagcaatactacagccagctanatcgccaatttacaaatgagttangtaagtaccataagtttgtttgaatatcaggtgcttcagagtttttctcaaacagttacaaaagagattaggttcccaatcagttcacaaaagctaatttaaagaatgtagcttaactacagtactgaggttgtcacacacttaactttcggtctcttgcttatttattcatatctgaggttcactgtttctactaggatacattccgcccacacccacaccttggtccccacatcaagcagctcctcacagcaggaagacatccgctatcagacatggttttctgaagttgtgcttaggatttcagaggaggaaaaattcagaggttctaatagcnttcggtaactgaggtagaatatggggctcccaagaatatcttccatatgccccaaatctgtttccctcccaccnnnntccagctctgttcaaggtcaagtttgagaaagatacntgttctcanatggtatatttttaannatcnacatcnatttttaagagactacctgctaaanggagaatantggctcactgcantcttttctcnaccccctnaactattttaaaannnnntggcagggacaggtgccatgctcacgcctgtaatcccagcactttgggagccgaggcgggcagatcacttgaggtcgggagtttaagaccagcctgacccacatggagaaaccccgtctccactaaaaataccaaatta

SEQ ID NO: 263 - DNA, 1896 bp, Homo sapiens
  modified_base (2)..(2): a, c, g, t, unknown, or other
  modified_base (190)..(190): a, c, g, t, unknown, or other
  modified_base (475)..(475): a, c, g, t, unknown, or other
  modified_base (499)..(500): a, c, g, t, unknown, or other
  modified_base (515)..(515): a, c, g, t, unknown, or other
  modified_base (623)..(623): a, c, g, t, unknown, or other
  modified_base (706)..(706): a, c, g, t, unknown, or other
  modified_base (730)..(730): a, c, g, t, unknown, or other
  modified_base (757)..(757): a, c, g, t, unknown, or other
  modified_base (775)..(775): a, c, g, t, unknown, or other
  modified_base (786)..(786): a, c, g, t, unknown, or other
  modified_base (788)..(788): a, c, g, t, unknown, or other
  modified_base (793)..(793): a, c, g, t, unknown, or other
  modified_base (812)..(812): a, c, g, t, unknown, or other
  modified_base (832)..(832): a, c, g, t, unknown, or other
  modified_base (957)..(957): a, c, g, t, unknown, or other
  modified_base (1768)..(1768): a, c, g, t, unknown, or other
  modified_base (1856)..(1863): a, c, g, t, unknown, or other
gnctggctccttgaggggaggtgcagctttcatctgaccatgcaggcgtgctttgcagtgggtagagcagtgctttcctcctcccagctgcacactggaatcacctggagagtccagaaacttcccgcctcagtgaaagaacatcagtgtatcagcacagcaaatattccaaatgccaggctggattccntccaattaccaggacctccaggcttctcctcctttcaagaactttctgaccctggatccagtctaaatgttggttataaactcacctgacatccacagggcccttccaaaatactgtcaaggctgactgctggtgcctggaacctgcacaccctcctgggactctgcatctctgctggggctggtttctcctctgagccaccttaaggaatcccaccctgacccggtcagagctcaccatgcctccctctcctacttgctcagcattttgtgtctatctagactnaagcctttgctttctctctgtganngtggtgaaagttcantttgctttcctatctctagaatgtcagcacgaaggcagaggcatggtctcctgagttccataaccccaaagcctaactccctgcctgccacactgaggggcttagtanacattgacttactaaattgaatagttgagtaataatgctctttgaaataatttggagttagatcttgagccttgtgtggccangaggatgggtgaggacacatcatnaaaactaaaggtaactgagcatgccangtggttggggtgagaaanttgcatggagnantccangacacagaggcagcaaaancccaagtgctgggaagtcangagtgagagagtgaaggggcagtgagtgcttctttaggagctggatcaaaacctaagatgatctggccacatggtgcagactgagcacacacttgggagagaaatgggccaggaggagaggaganaggttcaccacaggacagtggatgactgggaatagaagccctccccatggtggaccaagaagtctgtgaagctgagagaaagacaaaagaaatcacgacttctgtaggtagctgggatggaaacctcaggggtgacagggtctttaaaggaaatctcaaggaaggcatcatgttctgggtgtgctccagggatgctgagtaagaaaagaccagcctttctgtgtgtgtctttactctgccacaaggcacctgggctcctaaatgaccaatacacatgtgctatactggtgccaagaaagaagggtgttttgtaggaaagtcaaggtgagaggaggtgcccaggacttggctcctttctttgaagggtgacggtgtaaattctccatgctggggatcctactgatggatggaggcatgtcgatctcatcatttcacagagtggggagctatggccacaacgtgcctatcacacaagtccagcctcacgtcagctggacaccagctgttctgacacttgtcagcacatggggcacccggaagttcatggtgttctgcaaagaacgccacaaaacagtgagctcaacttcttgaaagtcataatgtgttgctaagtccgatcccagatcctaaaaataatatgaggtagtggccattgaacagaaaaaatttacatcttaaacttgaagataagtacaagtgtacctttttctaccactgttgttcagttttattatattgacaagcacctctgcccaccctgtggggtaaaactgtttgaaagtgtttatgaaagttttatataaatattggntgatcaaatgtacaaaatatgcatgatggcaccatattgtgtataatagtgacaaatacagtctatgtgggtggagaaacaaaaaaannnnnnnnaaaaaaaaaaaaaaaaaaaaaaaaaaaaaaaaa

SEQ ID NO: 264 - DNA, 560 bp, Homo sapiens
  modified_base (518)..(518): a, c, g, t, unknown, or other
  modified_base (520)..(521): a, c, g, t, unknown, or other
  modified_base (525)..(525): a, c, g, t, unknown, or other
  modified_base (544)..(544): a, c, g, t, unknown, or other
atacctgtctccattcacatttacctgggaccagggtgggcaggagacaccaggtcatggctcctgagccccggccccctggactgaagggacagtgtgtgagaatcagttctgtgaagggcgggaggaagcagtcacctattcctcctgccttcacagttaaggtgaaaaccttagccctatccttgattcctgggggctgccgggccctgtgtgctcccctgcacacctgggtgcctttctgaggctggcagcagcggccggggtcaggggtcctgggctcctaggctcacacctcagctcacagttgcgtccttgcaggaggacactgggtgtctgacaaacacaaggcctcgacagcaggtctggaactttcaaccccagcaggatgagggggaatgggggtggatgtcaggtaagtaatttctggtcccactacaaaactttatttttgattagagtaccattctcaatctcttctacaaaaagcaaaaaaaagcaaaaaaaaaaaaaaaaanannggcngccatttcactcatttcangacctatatccttgta

SEQ ID NO: 265 - DNA, 804 bp, Homo sapiens
  modified_base (215)..(216): a, c, g, t, unknown, or other
  modified_base (220)..(222): a, c, g, t, unknown, or other
  modified_base (738)..(738): a, c, g, t, unknown, or other
  modified_base (743)..(743): a, c, g, t, unknown, or other
  modified_base (745)..(746): a, c, g, t, unknown, or other
agccatgagacccttaggttaattagggcatccaaaattaccttttgggaaaaagccctaaaggggggccccaagccctggattattttccccggggcgagaatttcaatatcaagctttttggatcccgggtcccttaagtttttttttttttttttttttttttttttttttttttttttttttttttttttttttttttttttttttttttnntttnnntgaatttaagactttactttattcagcaaaatcatttatttacacaatggggaatgctggtttgattttgtcaatgaaataaaaacaaaatgaacagagacaatactgaactgtatatatactttgtatcagagttgaccaactgtttccttacctgtatcaggaacatcaagagcaacagtatcacaaggacactggtttaacaatacaccacataggtccagtaataccctgggaatttcccaatgcaatcaccaactttttctttttttataaatatataaaaaaacaaaaagtcagcaaaaccagcattatgatgtagcaaacagagtataactctgaagtcagtggggtcagtaaaagccttatcagaccatccatagttttacaatgtgatctgctcttcctcagaccactaatatagaatccaaacaggtgaaaaatacgtcactccttagaatacaacaatgatctgataaggatttgacttagtggaaggaaaaaaaaaaaaaaaangggantnncagagcatagcccctattagaacaagctaactttccagattttacaaattaaaaaaac

SEQ ID NO: 266 - DNA, 1207 bp, Homo sapiens
  modified_base (193)..(193): a, c, g, t, unknown, or other
  modified_base (639)..(639): a, c, g, t, unknown, or other
tgtgtgtgtgtgtgtgtgtgtgtgcgcgcgcgcacgcacgccttgagcagtcagcattgcacctgctatggagaagggtattcctttattaaaatcttcctcatttggatttgctttcagttggttttcaatttgctcactggccagagacattgatggcagttcttatctgcatcactaatcagctcctggnttttttttttttttttcaaacaatggtttgaaacaactactggaatattgtccacaataagctggaagtttgttgtagtatgcctcaaatataactgactgtatactatagtggtaacttttcaaacagcccttagcacttttatactaattaacccatttgtgcattgagttttcttttaaaaatgcttgttgtgaaagacacagatacccagtatgcttaacgtgaaaagaaaatgtgttctgttttgtaaaggaactttcaagtattgttgtaaatacttggacagaggttgctgaactttaaaaaaaattaatttattattataatgacctaatttattaatctgaagattaaccatttttttgtcttagaatatcaaaaagaaaaagaaaaaggtgttctagctgtttgcatcaaaggaaaaaaagatttattatcaaggngcaatatttttatcttttccaaaataaatttgttaatgatacattacaaaaatagattgacatcagcctgattagtataaattttgttggtaattaatccattcctggcataaaaagtctttatcaaaaaaaattgtagatgcttgctttttgttttttcaatcatggccatattatgaaaatactaacaggatataggacaaggtgtaaatttttttattattattttaaagatatgatttatcctgagtgctgtatctattactcttttactttggttcctgttgtgctcttgtaaaagaaaaatataatttcctgaagaataaaatagatatatggcacttggagtgcatcatagttctacagtttgtttttgttttcttcaaaaaagctgtaagagaattatctgcaacttgattcttggcaggaaataaacattttgagttgaaatcacacagtgtaacttgcaaaaagattccatctctgagatccgaaagacttttaaggttatcagtccaatgaacccctggtgtaacaagaagtcccatgcttttgtcattaggcgggt

SEQ ID NO: 267 - DNA, 818 bp, Homo sapiens
  modified_base (2)..(7): a, c, g, t, unknown, or other
  modified_base (52)..(53): a, c, g, t, unknown, or other
  modified_base (74)..(74): a, c, g, t, unknown, or other
  modified_base (121)..(121): a, c, g, t, unknown, or other
  modified_base (125)..(125): a, c, g, t, unknown, or other
  modified_base (616)..(616): a, c, g, t, unknown, or other
  modified_base (751)..(751): a, c, g, t, unknown, or other
gnnnnnnctttttttttttttttttcagactgaccgcggggcagctgcggannatgtcgaccccggcccggagnaggctcatgcgggatttcaagcggttacaagaggacccacctgtggntgtncagtggcgcaccatctgaaaacaacatcatgcagtggaatgcagttatatttggaccagaagggacaccttttgaagatggtacttttaaactagtaatagaattttctgaagaatatccaaataaaccaccaactgttaggtttttatccaaaatgtttcatccaaatgtgtatgctgatggtagcatatgtttagatatccttcagaatcgatggagtccaacatatgatgtatcttctatcttaacatcaattcagtctctgctggatgaaccgaatcctaacagtccagccaatagccaggcagcacagctttatcaggaaaacaaacgagaatatgagaaaagagtttcggccattgttgaacaaagctggaatgattcataatagacaactggtctgttaatctttttcatcattgttgtgtataatttacctctcattagaaaggctaacaaattttaagtgccacaggttttaaggattctgnagaaaaaaaagaaaaaagtccttcagtttagaacctacaaaagcttgtgtatcttgattaatgtactttttattgcatggtgtgaactaagttattgctgcataaatttgtaatatatcctgtttgtattttttncaagtgtataatgttggtgtggagttttcatgacagaatatacacattttgtaaatctgtacttttt

SEQ ID NO: 268 - DNA, 771 bp, Homo sapiens
  modified_base (25)..(25): a, c, g, t, unknown, or other
  modified_base (102)..(102): a, c, g, t, unknown, or other
  modified_base (615)..(615): a, c, g, t, unknown, or other
  modified_base (620)..(620): a, c, g, t, unknown, or other
  modified_base (628)..(629): a, c, g, t, unknown, or other
ttttttttttttttttttttttttnttttttttttttcaagttgacatgtgtatttattgcacaaatatcccctagaactgggaggttattataatacaagngtacatttgagaaatgtatacagaacaagaaacagctatgtacatatccaacatctaagtaacttagaaaaagcagaacaatctcataagacatctaccagaagtaggcattatgtaaaatctgtttttttaagtgatcatccccagagtatgccaattggaacaaaacaaaatctgtactagtatgtttttattgcacttaacattttcaaactcaaaattaagacatattaataaaagccagaaatatttaaaatcaaaccaattagtttatatacaagaaaaaattagttttaattctataatgtaaaagatcccttttttatttcctgtttcaataaacaggttttttttgatatgtaacaactgtctgtaccataacttgtaaaaattatttagaacaagccaaaactcttttcacattcatcataatgaccacactttaaagtagcagcagctcattccttgggctttgcgtaaggaaagaatgactatggtgaaggtaatagaaanttatngaaggatnnggatttacaaactcaggattgggaaccgtggggaggaacaaacaataacttaggaatcctttagggtttaggttttttaagaaacatatggaatttccttcccacaaagttacttttggaccaaattcttgggccccctttt

SEQ ID NO: 269 - DNA, 484 bp, Homo sapiens
  modified_base (10)..(11): a, c, g, t, unknown, or other
  modified_base (138)..(138): a, c, g, t, unknown, or other
  modified_base (166)..(176): a, c, g, t, unknown, or other
  modified_base (179)..(180): a, c, g, t, unknown, or other
  modified_base (265)..(280): a, c, g, t, unknown, or other
  modified_base (282)..(283): a, c, g, t, unknown, or other
  modified_base (441)..(441): a, c, g, t, unknown, or other
gcggccgccnnctactactatacggctgcgagaagacgacagaaggggaggatgaggcaccattccaggagaaagattccggcagcgatgaagatttcctaatggaagatgatgacgatagtgactatggcagttcgnaaaaaaaaaaaaaaaaaaaaaaaaaaannnnnnnnnnngannaaaaagaaaaggaaatgcccaaacccagactaaaggctacagtgacgccaagtccagtgaaaggcaaagggaaagtgggtcgccnnnnnnnnnnnnnnnnannatacggctgcgagaagacgacagaaggggaggatgaggcaccattccaggagaaagattccggcagcgatgaagatttcctaatggaagatgatgacgatagtgactatggcagttcgaaaaagaaaaacaaaaagatggttaagaagtccaaacctnaaaaaaaaaaaaaaaaaaaaaaaaaaagtcgtatcgatgtcga

SEQ ID NO: 270 - DNA, 862 bp, Homo sapiens
  modified_base (151)..(151): a, c, g, t, unknown, or other
  modified_base (646)..(646): a, c, g, t, unknown, or other
  modified_base (693)..(693): a, c, g, t, unknown, or other
  modified_base (702)..(702): a, c, g, t, unknown, or other
  modified_base (710)..(710): a, c, g, t, unknown, or other
  modified_base (716)..(716): a, c, g, t, unknown, or other
  modified_base (718)..(718): a, c, g, t, unknown, or other
  modified_base (721)..(722): a, c, g, t, unknown, or other
  modified_base (724)..(725): a, c, g, t, unknown, or other
  modified_base (737)..(737): a, c, g, t, unknown, or other
  modified_base (744)..(744): a, c, g, t, unknown, or other
  modified_base (746)..(746): a, c, g, t, unknown, or other
  modified_base (753)..(753): a, c, g, t, unknown, or other
  modified_base (767)..(768): a, c, g, t, unknown, or other
  modified_base (772)..(772): a, c, g, t, unknown, or other
  modified_base (774)..(774): a, c, g, t, unknown, or other
  modified_base (781)..(782): a, c, g, t, unknown, or other
  modified_base (784)..(784): a, c, g, t, unknown, or other
taattaaaaacttttttttggaaacctttgggaaaattttttttttttttttttttttttggtcaagcttgaggctgaataaagcctttgatgcacaaaatgggactgctgaagagtggacagttggaccttactttggtgaccccatacntttgtggtcacatgctttagccatacacatggtaacattgactatggagtcttgtgaaagtgtaatgtgcgatggctatgtagacataaagaagaaacttgtaaatatcttttttcttttttttaatgtttctgatttctgaagtgcttgtatagcttttatctgcggctttaaactgacagtacccgactgtttattggatctattgatttgaaaagaatttgttaggatagatcttaagcagtaatctgtcagtgtttgtatttgtattctctgcaattttactgtgaaaaaaaatttgttttcaacaattggtgtcattttcttgatgtcactatttgttggagagttaaatggtctcttccctttgtgtatcttacctagtgtttactcctgggcacccttaatcttcagaggtgctaaattgtctgccattacaccagaaggatgcctctgataggaggacaaccatgcaaattgtgaaatagtcctgangttcttggattactttacacctcagtattgatttgtcccagaatttnctggccttncatggcantgaaantnttnngnngaaagatttaangtatttnanttttaangagtgtgttataannatantngtactgnntnctttatcccattttatcatcctttcagtttttattaatctactgtatcaataaaattctgtaatttaaaagagaaaaa

SEQ ID NO: 271 - DNA, 957 bp, Homo sapiens
  modified_base (18)..(18): a, c, g, t, unknown, or other
  modified_base (118)..(118): a, c, g, t, unknown, or other
  modified_base (126)..(126): a, c, g, t, unknown, or other
  modified_base (157)..(158): a, c, g, t, unknown, or other
  modified_base (182)..(182): a, c, g, t, unknown, or other
  modified_base (226)..(226): a, c, g, t, unknown, or other
  modified_base (256)..(256): a, c, g, t, unknown, or other
  modified_base (264)..(264): a, c, g, t, unknown, or other
  modified_base (272)..(272): a, c, g, t, unknown, or other
  modified_base (278)..(278): a, c, g, t, unknown, or other
  modified_base (283)..(283): a, c, g, t, unknown, or other
  modified_base (286)..(286): a, c, g, t, unknown, or other
  modified_base (290)..(290): a, c, g, t, unknown, or other
  modified_base (306)..(306): a, c, g, t, unknown, or other
  modified_base (309)..(309): a, c, g, t, unknown, or other
  modified_base (368)..(368): a, c, g, t, unknown, or other
  modified_base (887)..(887): a, c, g, t, unknown, or other
agcgctttggaaagacanaatctagaacactactagcagacaaaaaattacctgcaactggatagcgtaagtgcagtatagcgagacaaaacatatattcatatgttggcttgtttangcctcaanccctcgaccctttgttgagatcccataattnnattcctatgattttaataactcangttccaggaggactataagtctaatttgtactccaaaccaaacngcagtgcagttcgctactactgaggctgantctgtacngacttcangaccangtccngangacngttattatctaaaaantanttacttgaatacatagatgatccttcagagattttacctataacctatttcttgatganggttatttaatgcactggagataactgtgacttactgatcaaatacttgaatacttatacttacctgggatttcatttctgctgaaagaaataggaagaacaggactcacttaaaaaaaaaaaaaaaaactttagaaaggaaggtaaaaatcttacacacactatcacttttggaagcagcatagaaggggcagtcaagggtaaaacactggtgaaacaggtcaaaattaggaaaaaaaaaaaaactatattattatcaatgacagtaccacaactgtgcccttgataattagtaatcactcctaaaaatcttcatttggcaccagatggtgtgtttaaaacaccctaggatgttttgaatcaggcttgattttgttagttgagttacaggagaattttaagggtgagggtatgggggtcagggaagaaaaggaaatgggaaatggaccagaaaaaatcttgagtcatcatctaaatcaacaaagcactgatagctccaaatattaggtcagacactanaacgactgatataggctcaagtggtttataaaacctataaaaagactacaccagcagagtccctgtcaat

SEQ ID NO: 272 - DNA, 485 bp, Homo sapiens
  modified_base (10)..(10): a, c, g, t, unknown, or other
tttttttttngcagtttttcctgtttattatatagttattctaaggtggtaagtgtcacaaagttaacttcaagaggaataacatggtccagtgtgaaacacaaggtacaacattttacaatgaaaccacagcacaaagtaactgaactttcaaaattgggtagttcaatgaaacattttgtcaacccttagctctataaagctctgctgatggacttagttgatggatttaaaaaatatattgctgtgtcaaatgttttaacacaaaatgtttttttttaaagagaatacacatccaatcaactgaaactgtgagcagaaagtatgtaacctctttataaaaacgttatccaaatttacaacattcataatatatttcaaagtaaagagttcttagaaaaaataaactcaattccttgcttactgatgagtatcaactcctcaaaaacacatcacagaaagttaactttcatacttctttgcct

SEQ ID NO: 273 - DNA, 685 bp, Homo sapiens
  modified_base (3)..(8): a, c, g, t, unknown, or other
  modified_base (19)..(19): a, c, g, t, unknown, or other
  modified_base (487)..(487): a, c, g, t, unknown, or other
  modified_base (520)..(520): a, c, g, t, unknown, or other
  modified_base (572)..(572): a, c, g, t, unknown, or other
ggnnnnnnttttttttttnttttttttattggtgtagttacgaagcctttcaggctgcttctgtttaaaatataaaagaaaactttgccccctttgcatcttcataaacctgctgcggcagactcctcagccgatggtggctctgggtttccttgagtgtcatatgtcctagaaagttgctggctgactcttttttgtctggggcctggggaaagggcttggactgtgaaaagaaatgtggcccctttccatcttcaagagagatggaattaatgatggatggaccctggagggaatctccccagccgacttccactgggctgacagactttgctgaccacaggggaacgatgttcttttctttcttcatgatcagacataaacttagcatcttaatggaagaaaaatgaggggaacttcaattatgatttattaaagacaatttctattacaccctcctttatgacaagtgacattttagatgtanaagtaaaaactttaccatgcctttttttttttngttggcctaacattgaggccttaaaacctgaggctcctgtgcctgatggaantcttgtaacatacacttgtgtatcatataaagataccactctgtttctcttatgtattcttactctagttgtttattaagaatgacaagcacgtcttttcaaaaaaaaaaaaa

SEQ ID NO: 274 - DNA, 570 bp, Homo sapiens
  modified_base (75)..(77): a, c, g, t, unknown, or other
tttgtttttttttttttttttacaccataaagtgattattaagctttcctttttactctttggctagcttttttnnnttttttttttttttttttttaattatctcttggatgacatttacaccgataacacacaggctgctgtaactgtcaggacagtgcgacggtatttttcctagcaagatgcaaactaatgagatgtattaaaataaacatggtatacctacctatgcatcatttcctaaatgtttctggctttgtgtttctcccttaccctgctttatttgttaatttaagccattttgaaagaactatgcgtcaaccaatcgtacgccgtccctgcggcacctgccccagagcccgtttgtggctgagtgacaacttgttccccgcagtgcacacctagaatgctgtgttcccacgcggcacgtgagatgcattgccgcttctgtctgtgttgttggtgtgccctggtgccgtggtggcggtcactccctctgctgccagtgtttggacagaacccaaattctttatttttggtaagatattgtgctttacctgtattaacaga

SEQ ID NO: 275 - DNA, 682 bp, Homo sapiens
  modified_base (412)..(412): a, c, g, t, unknown, or other
  modified_base (500)..(500): a, c, g, t, unknown, or other
  modified_base (514)..(514): a, c, g, t, unknown, or other
  modified_base (522)..(522): a, c, g, t, unknown, or other
tggttgttttgaaaaacccccatatttttgggaattttttttttttttttttttttgataagttggtgtaaggctatgtgacttgatcaaaacagatgcagggcctctaaataaaagggatcatctgaaattaatgttgtttgaaattactatctgattttgagggttccagtatttctgtgaaaattcaacaagaactccttggaaactggtattgatattcagtctccttaaggtagatttttcaagcttttcatacattggaactccacctgactttggaccaaccccagaacagagcagagccacctcctatagacgcccattgccctgctgctgtacacttcagcagcttgcacaagggagctcacttaaaaggagaaattgtgtagttttaaaatatattttgtgnaaaataccttactatgctataaaccaccattaaaaaccagtgttttgatttggtacttaaatatttttggagtgaaaattatcactanagtaacatgactcncaacaaangtatggtttcattataaaagagtactgtattgatttgcccaagttttgtaacttagtaaaggtattaacttccttggatttgtactttgtgatttagtatgctgtatcgtgggctggttatgttaactgaaaaaaataaagtcattacctgagttttgca

SEQ ID NO: 276 - DNA, 500 bp, Homo sapiens
  modified_base (4)..(4): a, c, g, t, unknown, or other
attngtgttctgggtttttttttttttttaaccaactcaatatgtgtttgatgatagtgaattgataaaacccgaagcttttccctgtaaatcttacatctttgcctttaaagaatgggttacaaccatcactagatcacagtagtgcctaatgaaggttgagaaccgtaggagaggctctcatgctgtaaataatgttgcaggctaataacctttcatcacttcctttgtgcgcttcctgccttaagtgacaagtagcaacatggcttgggtcccctgtgcagcatcagcttatgctgccacaagtcagtttgcaccctaggtgcccaggagctagtatccttagatctttctatcgctaacttaattctcttcgttatttatctgaccctctaactccatgtctaacttgcattaaaaaaaaaaaaattctttacagtcaacccaagcttaacatggactcaggttccccagcagccttaatttgttttgttaccatc

SEQ ID NO: 277 - DNA, 405 bp, Homo sapiens
  modified_base (12)..(15): a, c, g, t, unknown, or other
cacgaggttttnnnntgcttggtaaacgaaaagcaaacttctttattgtacacagtacagaatataacgcagcttggcaggatgcatacggccctgcgcaggggaaagtatttcaaatcagctggcaggttcaagcctttctgcactgtagactttccacactctggaaaagaagcaaacaaacaaaccccaaagaacccccgaaaaaaacaaaaaccatccgggaggtgcatgagtccaatgggaatgcaaccgtgatgccgctgtcctatgcccagtgacagcacaggtcacgtaagttacagcaggggaggggtagctcaagctacagaggattattgtcatattgctaagacagcataaatccattcaaaaaaaaaaaaaaaaaaatccaaaccagggtaa

SEQ ID NO: 278 - DNA, 793 bp, Homo sapiens; identical to SEQ ID NO: 67
  modified_base (618)..(618): a, c, g, t, unknown, or other
  modified_base (632)..(632): a, c, g, t, unknown, or other
  modified_base (661)..(661): a, c, g, t, unknown, or other
  modified_base (678)..(678): a, c, g, t, unknown, or other

SEQ ID NO: 279 - DNA, 588 bp, Homo sapiens
  modified_base (8)..(9): a, c, g, t, unknown, or other
ttttttanntttaaaatacatttccatttttaatttaaaaaataaataacagcaaatctgaacaaaattttcctacttcaatgcacatcttcctaactgtccatgtttgaaatccagatagcaacaaaatcatggcaaaggcatttttgacaaagtttagacaaacgactcacaaaatatggctaatagtagatgagtttggacatctgatactgcagaccagccttggctagatcctaggcgtcagagtgaaatcatgaatttccttttgtagattagaattgatggtccaactctcaacccaccaaagagaaacttaccttttccaatttaattgtaaaagccagatatatcactgaatgaaggtatctaaggaagtgatatttatcaacttcccaaatgatacagagaaggaaagcataattattaaaatgaacctaaagtctagatacagtgggccaggctggtgaagccttagactactatggaaatgacattgtttataagatgttgcacaaattatggtaatctgtgtcaatatttcaatgtgtgctggattattactgacatattcataattttaatgtc

SEQ ID NO: 280 - DNA, 703 bp, Homo sapiens
  modified_base (457)..(457): a, c, g, t, unknown, or other
  modified_base (459)..(459): a, c, g, t, unknown, or other
  modified_base (464)..(464): a, c, g, t, unknown, or other
  modified_base (467)..(467): a, c, g, t, unknown, or other
  modified_base (471)..(471): a, c, g, t, unknown, or other
  modified_base (479)..(479): a, c, g, t, unknown, or other
  modified_base (481)..(483): a, c, g, t, unknown, or other
  modified_base (485)..(485): a, c, g, t, unknown, or other
  modified_base (490)..(490): a, c, g, t, unknown, or other
  modified_base (495)..(495): a, c, g, t, unknown, or other
  modified_base (498)..(498): a, c, g, t, unknown, or other
  modified_base (514)..(514): a, c, g, t, unknown, or other
  modified_base (517)..(517): a, c, g, t, unknown, or other
  modified_base (530)..(531): a, c, g, t, unknown, or other
ttttttttttttttttggataactcagtttcagataaaccatcttggttactgtgcttaatttggaccaaattttatttagcttaatatggacactgacacattttggggggtatacattagacatatcagagcagtgtatttctggatcattttttaaatgacctcttctaaaacataactgtcacttacctgaaatgctgcatcctaaaattccaaaattatattgagcaatcgccaaggcctaaagccaactgacttaaaggtaatcatttcagctaagattaaatttaaagcctaagaatgtatagagctagttttaaaataatgatctcagatttttaaaaaggatataggaacctgcattgtcattctctgaattaagaactgatggtttctatcattatttagccccacctttgtattttaaaatccttcagaatacatttatgaaccanantgcgnacntggnacttagcncnnnancacanatggnaanattcagaccttgactnatnttggtgtttccannttcacaaaggtgatgaatgactgtcttgaggagcagcttaatccgcacactatttgtcacatttcttgctgctcctaggctgtgtgaaacttactgtgaaccatctaccatatacattgggtcctgtccaattctactgaatgggggtggacctggctattttatctggcca

SEQ ID NO: 281 - DNA, 450 bp, Homo sapiens
  modified_base (411)..(413): a, c, g, t, unknown, or other
  modified_base (417)..(418): a, c, g, t, unknown, or other
ttttttttttttttttttttttttttcttatcaaaaatattttatttacaaaaaattaattatactatacatcctatactggaaatacattgaataattgctaaaataaatacaggcaattaattcaactttttataagaatgagagaatttgacatttgaatgttatcaaagcttaacttagaacataaatagttaaaaaggcaaactcaagttttcatctcatttattggcatggtgtgttttgttttccacaagctctccaatcagtgagagtcttgagtctcagatgtacctttttgtactctgaaggtaggatgtgcagctttttcttaggcaggatagatgtaacatagatgactgcataaaaaagaggcagaaaggcaggaagcccattttttttttaacactnnnccanntgtctctgcctcaccataatgctgtttattca

SEQ ID NO: 282 - DNA, 483 bp, Homo sapiens
  modified_base (427)..(428): a, c, g, t, unknown, or other
tttttttttgccttcaactaaaaacaaaggagataaatctagtatacattgtctctaaattgtgggtctatttctagttattacccagagtttttatgtagcagggaaaatatatatctaaatttagaaatcatttgggttaatatggctcttcataattctaagactaatgctctctagaaacctaaccacctaccttacagtgagggctatacatggtagccagttgaatttatggaatctaccaactgtttagggccctgatttgctgggcagtttttctgtattttataagtatcttcatgtatccctgttactgatagggatacatgctcttagaaaattcactattggctgggagtggtggctcatgcctgtaatcccagcacttggagaggctgaggttgcgccactacactccagcctnngtagtccagcctggtgacagagcaagactccatcttcgtaagagaattatagatc

SEQ ID NO: 283 - DNA, 416 bp, Homo sapiens
  modified_base (379)..(379): a, c, g, t, unknown, or other
  modified_base (382)..(382): a, c, g, t, unknown, or other
  modified_base (389)..(389): a, c, g, t, unknown, or other
acatcaactaaagtagctaagctactgtaatgatttgaaagtttgttatgagagaattatgctttgtcaagccaactataaggcagctttctacaacagttctgcaaaatgtttccaccacattgagcaaagctgacactagacactagctacacgtgggaataggaagatgggccaggctcagagccgccgcaaaggatgaagtccactcagatttgaggcaatcctggggcaaagcactgagcaaagcaacttctctggtaatctcctcctcagccattctctacccaggatttcagaacacagaacagaagaaactgcaaaagccctgcaggatatatcacagctgttaacattctgactttaaaaaaaaaaaaanaangaccganttatcggtgaaacctggctcaaagacc

SEQ ID NO: 284 - DNA, 504 bp, Homo sapiens
tttttttttttttttggctgtgacctcttcaaaccgtggtacccccccttttctccccacgatgatatctatatatgtatctacaatacatatatctacacatacagaaagaagcagttctcacaatgttgctagttttttgcttctctttcccccaccctactccctccaattcccccttaaacttccaaagcttcgtcttgtgtttgctgcagagtgattcgggggctgacctagaccagtttgcatgattcttctcttgtgatttggttgcactttagacatttttgtgccattatatttgcattatgtatttataatttaaatgatatttaggtttttggctgagtactggaataaacagtgagcatatctggtatatgtcattatttattgttaaattacatttttaagctccatgtgcatataaaggttatgaaacatatcatggtaatgacagatgcaagttattttatttgcttatttttataattaaagatgcca

SEQ ID NO: 285 - DNA, 832 bp, Homo sapiens
  modified_base (266)..(266): a, c, g, t, unknown, or other
  modified_base (268)..(268): a, c, g, t, unknown, or other
tccacttgtaaaatcattttattggtataaatatacatatgaataaaatacttccagcctgtaatgtaagtgaatatttgtgaaatgtcttataaagagtagtattttgatttttacaggtgtcaaagtattctctcttaaaatcacacattaaaagctaatatgcagacagaaattaaaggccttcaaaaacatgaatattcataaaacctcattccaatcaactatatacattaatctgggcacatggtaaaatcagccatggncntctctcactctgttcttagctgtgctcgttgatggtatgcaaaggtcaccgaccaagctttaaatgtacaattccacatcaggaaggaagaagttccccatgggagaaggtaaaaaccatacccaagatctaatatatataatctatacaaattattagtgtgctctgttaatataattacaatgtgcaattgcatacatcaagaataaattgctatattgagtcctgtgcggatttgacacaggtacacttagcagtactccgaggtctgctgtggtgttacttgtgtgagtgtgtgtccagttatttcatttatctccaaaaactcatcttgcagggcaatctgtagctgcctcagataaattcaagtagggcccatgggataattgctggctttcattaaaggcatatgaaggaatgtttagaaatcaaatgcaaagggttggaggaagaccaaacaaatgtgctttgattaccaagaaatggatctgtttctatacaaaaaaaaaaaaaaaaaaaaaaaaagggggggggtttttgggttttcgggggcccccgccccaa

SEQ ID NO: 286 - DNA, 687 bp, Homo sapiens
agatgctagtactttaatccaggtatagcagtttcccgttattttcttgcttgtcgttcccctacatttcttcctgatttcccaagactctctttgtggcttttgagggtcagccaaggagcaggcaagtgagtgaacaatcctcaggaaaagaaggaccattttagcttaacacttcctttttttttttttttttttaagaagaatataggtaaacaggtaatgattcttgattggagataccatttgactcttgatgagagttgtacgaagatggaaatgagggatgattccaggcgttttagggggaaggctgcagataccattctaacccccaagatactgtgttctcaagacctcttagaactaggtgttgtcagggataatttgaggagggcttagtcttcagaacaatcctgcagtcttgacagaaatctaaaatctccaaaaactcctaccctttaaccttaccctagggggaactgatctatgaatattacatgtgtgattatgaaaggtgaagttgagtgagaggagttgaggaacgtggaagacagtgagctctcaccctaacactataagaagcatgatctcaatagaccaataattcacctttttatacatctgtaaataaatggaatgtttttaagaatataattatgtcagatttagcattttcttttatat

SEQ ID NO: 287 - DNA, 744 bp, Homo sapiens
  modified_base (442)..(442): a, c, g, t, unknown, or other
  modified_base (444)..(444): a, c, g, t, unknown, or other
  modified_base (448)..(448): a, c, g, t, unknown, or other
tatttttttcttgaatgtgcttcgcaagccaggctatcttccaaggaaggcagacagtgggagagcagagggactgactgcaggcaagcacattgaagaaagacactggcgggtttccccaccctcaccccaaagcagaaaactagcagacgtcagctcagccccgtcctgggcacagacactacacaaggagacgctggaagttaagcaatactttaatactgtaatatgtttgttttctttttctttcttttttttctaccaaaaaaaagtaagtaaactaaaacacaaaaacatataaataaaatccatccctcttgtcggggacctgcaggggggcaaccttaatccaaacacctggctatcaaataatcagaatgtattgtctcagacaggatttcagttccgggaggcaggggcatgatgggggagggggccggangntganagacaaaagttccagagcctccctcgaaggttctctactactgtattctgtacataatgtaccatcccatgtggaatctgtgagtgtcctcttaagtagcgtgggctagccaatctgccgttcatggtgtattgtaaactccgaattccatatgtaataggatgcaagtctaagcgtttcatgtggacataaatgtatctaaataaaactttccctagcactgtggctgacctcacccttacttttatactttagtatgaaactgatgagaacttggtagtgagtattttttttat

SEQ ID NO: 288 - DNA, 468 bp, Homo sapiens
  modified_base (6)..(7): a, c, g, t, unknown, or other
  modified_base (409)..(409): a, c, g, t, unknown, or other
ccccgnntttttttttttggttttttttttttggctcatgaatttttctgtttgtcatggaaatgtaagagtggaatattaatacatttcagtttagttctgtaatgtcaggaatttttcaaaaaaattaaaagatggactggagctttttctttgtgaatagaaactggatgccacagtgattcatgtgggttttattcctcttgtcttgctgttatttttgtaccttttatccctcaaaggacccttcttgggttttgaatggaagcctttattccggttaagatgttttcttctattttaccacttccatctttttttgtggccctcgatcctatttttccctgactccatgcttggttggcccttataaaacttgtgcccaaaagattgaggattagactttccnaggacttacctgtcctaggggagtaggcaagcacttccactagggagggggtgggggaa

SEQ ID NO: 289 - DNA, 475 bp, Homo sapiens
  modified_base (156)..(157): a, c, g, t, unknown, or other
ttttttttttggttttaaagttctcttaggtataacttacataaacgttaataaatcttagggtacaccttggtgaattttgtatatgtctatacccaccacggtctccatcaaaatattttatcgtcccagaaatttcccttgggccccacctcnncctcaaaggttatcactattctgatgtctatcaccatagatttgtttttcctgttcatgtaaatggaaccataaacagccctcttgtgtctgttttcttcacttaatatagtgtcattgagatttatctatgttgtattatcagtagtttatgctttttaattgctgtgtaatagtccatagtctgaatataccacaatttaaaaattctattctgtttacaaacatttgagttctgtcctccaggttcatccatgttatcacaaatgacagaatttccttcctcatcaaggctgaatagtattccattgtgtagata

SEQ ID NO: 290 - DNA, 708 bp, Homo sapiens
  modified_base (495)..(495): a, c, g, t, unknown, or other
  modified_base (515)..(515): a, c, g, t, unknown, or other
  modified_base (593)..(593): a, c, g, t, unknown, or other
  modified_base (626)..(626): a, c, g, t, unknown, or other
  modified_base (628)..(628): a, c, g, t, unknown, or other
  modified_base (631)..(631): a, c, g, t, unknown, or other
  modified_base (638)..(639): a, c, g, t, unknown, or other
  modified_base (662)..(662): a, c, g, t, unknown, or other
  modified_base (672)..(678): a, c, g, t, unknown, or other
  modified_base (680)..(681): a, c, g, t, unknown, or other
  modified_base (684)..(684): a, c, g, t, unknown, or other
tttttttttttttttgtaaatttgagacttatgtaagcgtgatttcaaaccataattcgtgttgtaaatcagactccagcaatttttgttgtatgattttgtttttttgtaaagtgtaattgtccttgtacaaaatgctcatatttaattatgaactgctttaaatcactatcaaagttacaagaaatgtttggcttattgtgtgatgcaacagatatatagccctttcaagtcatgttgtgtttggacttggggttggaacagggagagcagcagccatgtcagctacacgctcaaatgtgcagatgattatggaaaataacctcaaaatcttacaaagctgaacatccaaggagttattgaaaactatcttaaatgttcttggtaggggagttggcattgttgataaagccagtcccttcatttaactgtctttcaggatgttccttcgttgtttccatgagtattgcaggtaataatacagtgtattcatanagaatctcaatcttggggcnaaatgccttgtttctttgcacctcttttcaagtccttacatttaattactaattgataagcagcagcttcctacatanagtaggaaactgccacatttttgctatcatgantngcntgggccnnctgctgttcctagtaagatattntgaattccannnnnnnannaangcttgagttaacaaacaagaaact

SEQ ID NO: 291 - DNA, 873 bp, Homo sapiens
  modified_base (28)..(28): a, c, g, t, unknown, or other
  modified_base (56)..(56): a, c, g, t, unknown, or other
  modified_base (63)..(63): a, c, g, t, unknown, or other
  modified_base (137)..(137): a, c, g, t, unknown, or other
  modified_base (139)..(139): a, c, g, t, unknown, or other
  modified_base (143)..(178): a, c, g, t, unknown, or other
  modified_base (186)..(186): a, c, g, t, unknown, or other
  modified_base (188)..(188): a, c, g, t, unknown, or other
  modified_base (192)..(192): a, c, g, t, unknown, or other
  modified_base (194)..(196): a, c, g, t, unknown, or other
  modified_base (649)..(649): a, c, g, t, unknown, or other
  modified_base (680)..(680): a, c, g, t, unknown, or other
  modified_base (685)..(689): a, c, g, t, unknown, or other
  modified_base (691)..(694): a, c, g, t, unknown, or other
  modified_base (696)..(696): a, c, g, t, unknown, or other
  modified_base (747)..(747): a, c, g, t, unknown, or other
  modified_base (750)..(762): a, c, g, t, unknown, or other
  modified_base (764)..(764): a, c, g, t, unknown, or other
  modified_base (766)..(766): a, c, g, t, unknown, or other
  modified_base (768)..(768): a, c, g, t, unknown, or other
  modified_base (770)..(770): a, c, g, t, unknown, or other
  modified_base (772)..(772): a, c, g, t, unknown, or other
  modified_base (774)..(775): a, c, g, t, unknown, or other
  modified_base (779)..(780): a, c, g, t, unknown, or other
  modified_base (784)..(784): a, c, g, t, unknown, or other
  modified_base (788)..(788): a, c, g, t, unknown, or other
  modified_base (791)..(794): a, c, g, t, unknown, or other
ggccagggtgcaaggagaaaggattttnaggaggggactccatggcttccgagttnctgactnaccctccacctcagaggtagttctgacactgtctcagttttgcagatgaagatgagattcttcagttctccatntngaannnnnnnnnnnnnnnnnnnnnnnnnnnnnnnnnnnnaagcagcngnggancnnngccgaccgctgtaaggaggtacagcagatccgcgaccagcaccccagcaaaatcccggtgatcatcgagcgctacaagggtgagaagcagctgcccgtcctggacaagaccaagtttttggtcccggaccatgtcaacatgagcgagttggtcaagatcatccggcgccgcctgcagctgaaccccacgcaggccttcttcctgctggtgaaccagcacagcatggtgagtgtgtccacgcccatcgcggacatctacgagcaggagaaagacgaggacggcttcctctatatggtctacgcctcccaggaaaccttcggcttctgagccagcagtaggggggctcggcctgggagtcggggggccccggtcaggccctgcccagagagctcctggttcctgaactgagctgcctctaccgtggtgggctgggcaggcatgtgcccccctagncagagggcaccaacccacctactctgccccngggtnnnnncnnnncnggtcgtgttagggttgtccctctgggtgctggctggtgggatgggggaggntgnnnnnnnnnnnnnancncncntncnntgtnnttcntctnttnnnnaggcaagtaatactttcattatgtgtctgtttttattaattatgtcaattgatgtcttttcattgtcatatatcgcact

SEQ ID NO: 292 - DNA, 1370 bp, Homo sapiens
  modified_base (7)..(7): a, c, g, t, unknown, or other
  modified_base (12)..(12): a, c, g, t, unknown, or other
  modified_base (65)..(65): a, c, g, t, unknown, or other
  modified_base (153)..(154): a, c, g, t, unknown, or other
  modified_base (156)..(159): a, c, g, t, unknown, or other
  modified_base (161)..(161): a, c, g, t, unknown, or other
  modified_base (189)..(189): a, c, g, t, unknown, or other
  modified_base (366)..(366): a, c, g, t, unknown, or other
  modified_base (752)..(752): a, c, g, t, unknown, or other
  modified_base (770)..(770): a, c, g, t, unknown, or other
  modified_base (774)..(777): a, c, g, t, unknown, or other
  modified_base (784)..(784): a, c, g, t, unknown, or other
caatggnagccntaggactgacagcatcagaagaatttatcaagatcacattgtcagcttttgangcaataatacagtatcctattttattgaaagactatcgctccacggttgttgactatatactgccacccttggtgtccttggttcaanncnnnnangtggagtggagactctttagcttgcggntgctctcagaaaccacatctctactcgtgaaccaggagtttggggatggcaaggagaaggccagtgttgattctgacagcaatcttctggctctcattcgagatgtcttacttccccagtatgagcacattcttttagaacctgacccagtaccagcatatgctctgaaactgctantcgcgatgactgaacacaacccaactttcacaagacttgtggaagaaagcaaactgatcccactcatttttgaagtaactctggaacatcaggagagcattctgggtaataccatgcaaagtgtgattgcattactcagcaatctagttgcctgcaaagattcgaatatggaactactttatgaacaaggacttgtcagtcacatctgtaacctgctcactgaaactgccacactgtgcttggatgtggacaataaaaacaacaatgagatggcagctccactgctcttttccctgcttgatattttgcacagcatgctgacctatacctccggtattgtacggctggctttgcaggcccagaagtctggctcaggagaggacccncaggctgcagaagacctnctgnnnntcaacanacctctgacagacctgattagcctgctcattccactgcttcctaatgaagatcctgagatttttgatgtttcatccaagtgcctgtctatactggttcagctgtatggaggggaaaacccggacagcctctctcctgaaaatgtggaaatttttgctcatttactgacatccaaggaggacccaaaggagcagaagcttctgttaaggattctcagaagaatgatcacctccaatgagaagcacttggagagcctcaagaatgcaggcagcctcctgcgggctctggagcggctggcccctgggagtggttcatttgccgacagtgcggtggctcccttggccctggaaatcctccaagccgttgggcactaggcaagaaggtgcttagcacaagcccgccctgtggccccagccctcggatgcataagcaaggtcagctcccagacacctttgccacatcccctcacagctgtctttggacctaataaagtcagcttaacccagaaaaaaaaaaaaaaaaaaaaaaaaaaaaaaaaaaaaaaaaaaaaaaaaaaaaaaaaaaaaaaaaaaaaaaaaaaaaaaaaa

SEQ ID NO: 293 - DNA, 1921 bp, Homo sapiens
  modified_base (58)..(63): a, c, g, t, unknown, or other
  modified_base (65)..(65): a, c, g, t, unknown, or other
  modified_base (69)..(69): a, c, g, t, unknown, or other
  modified_base (73)..(73): a, c, g, t, unknown, or other
  modified_base (77)..(77): a, c, g, t, unknown, or other
  modified_base (95)..(101): a, c, g, t, unknown, or other
  modified_base (104)..(104): a, c, g, t, unknown, or other
  modified_base (106)..(107): a, c, g, t, unknown, or other
  modified_base (114)..(114): a, c, g, t, unknown, or other
  modified_base (119)..(119): a, c, g, t, unknown, or other
  modified_base (123)..(123): a, c, g, t, unknown, or other
  modified_base (129)..(131): a, c, g, t, unknown, or other
  modified_base (145)..(145): a, c, g, t, unknown, or other
  modified_base (156)..(156): a, c, g, t, unknown, or other
  modified_base (166)..(166): a, c, g, t, unknown, or other
  modified_base (208)..(208): a, c, g, t, unknown, or other
  modified_base (247)..(247): a, c, g, t, unknown, or other
  modified_base (295)..(298): a, c, g, t, unknown, or other
  modified_base (300)..(300): a, c, g, t, unknown, or other
  modified_base (470)..(470): a, c, g, t, unknown, or other
  modified_base (521)..(522): a, c, g, t, unknown, or other
  modified_base (535)..(535): a, c, g, t, unknown, or other
  modified_base (537)..(537): a, c, g, t, unknown, or other
  modified_base (681)..(681): a, c, g, t, unknown, or other
  modified_base (785)..(785): a, c, g, t, unknown, or other
  modified_base (792)..(792): a, c, g, t, unknown, or other
  modified_base (871)..(871): a, c, g, t, unknown, or other
  modified_base (893)..(893): a, c, g, t, unknown, or other
  modified_base (942)..(945): a, c, g, t, unknown, or other
  modified_base (948)..(948): a, c, g, t, unknown, or other
  modified_base (950)..(952): a, c, g, t, unknown, or other
  modified_base (955)..(959): a, c, g, t, unknown, or other
  modified_base (961)..(970): a, c, g, t, unknown, or other
  modified_base (972)..(977): a, c, g, t, unknown, or other
  modified_base (1280)..(1280): a, c, g, t, unknown, or other
  modified_base (1364)..(1364): a, c, g, t, unknown, or other
  modified_base (1373)..(1373): a, c, g, t, unknown, or other
  modified_base (1377)..(1378): a, c, g, t, unknown, or other
  modified_base (1380)..(1382): a, c, g, t, unknown, or other
  modified_base (1384)..(1386): a, c, g, t, unknown, or other
  modified_base (1388)..(1389): a, c, g, t, unknown, or other
  modified_base (1571)..(1574): a, c, g, t, unknown, or other
  modified_base (1582)..(1582): a, c, g, t, unknown, or other
  modified_base (1584)..(1584): a, c, g, t, unknown, or other
  modified_base (1591)..(1591): a, c, g, t, unknown, or other
  modified_base (1667)..(1669): a, c, g, t, unknown, or other
  modified_base (1671)..(1672): a, c, g, t, unknown, or other
  modified_base (1674)..(1674): a, c, g, t, unknown, or other
  modified_base (1676)..(1685): a, c, g, t, unknown, or other
  modified_base (1687)..(1687): a, c, g, t, unknown, or other
  modified_base (1689)..(1689): a, c, g, t, unknown, or other
  modified_base (1691)..(1691): a, c, g, t, unknown, or other
  modified_base (1693)..(1693): a, c, g, t, unknown, or other
  modified_base (1699)..(1700): a, c, g, t, unknown, or other
  modified_base (1702)..(1703): a, c, g, t, unknown, or other
  modified_base (1705)..(1708): a, c, g, t, unknown, or other
  modified_base (1752)..(1752): a, c, g, t, unknown, or other
  modified_base (1762)..(1762): a, c, g, t, unknown, or other
ccccccaaacttttttttttcttttttttctttttttttgttttttttttcttttttnnnnnncntttntttntttntttttttttttttttttnnnnnnnaanannttgtaancaaancttnaatccnnnggattctcacaaancatattacaantgacagcatnaaaaaaaaatcttgcacagtaactcaaagttcggctctacantgtacccttaaactggcaggacatttttgaaatcacaantttgcacataaagaatgtcacgaacagccatgtatccatatacagcannnnanataaggaacttatgacctaaagcaaaggtaaactttcttgaaacttaacattctataccaactaggcaacctctgcccaggatgagagttggatttttcaaaaacctctaatttaatagtgcagcatttcgttttccctgatggcctgtgtttcacagcagtttttaaanactgcttgttcaactatagctgcagcctatatcccagctatggaaaaaaanngtaaatcttagtncnaatttttgccagttgtttctgtatttaaatttaaaaaaaaacacacttccgctgggcaggtttagaggtttattatcagtctgtgcataactaaaagttcaaagcaaattcaattttgcttaagggaacattgtaaagtaacanttcttggtattacatgcctcgtatgatccatttcaaaccatagagaattacacctttgtgtcactgtttcaagagacaaacagatttgaacagctaaaacatcntaaaaantgcaccaagcttatgaagtctcaaacaaaacttgaattttctgtacatactcctgtcaaatgaagtaatttcctgtacnccacttctcttgcaaactgtcntctatttcctttcatttgacctagatcgactaaaaaaaaaaaaaaaaannnnaanannnaannnnntnnnnnnnnnntnnnnnnggtgacactttagtgacatatcgaaatagaactttaaggtaaaaaatttatggcttagaagacaggccttagcatactatgtatgcaaagtcttaaatacaagttatcaaagatcttacctacgagacctagagaaggatcgggacggcttgtgatttctctcccgagacagcgatctctctcttctcctatctctagaaagggacctaaacaagcaaaaaaacattaggaccaatgaggtatgataaaattatacataaatattttcttgatctggcatggtgactcatgccaataattccnatattttgggaggcagaggcaggaggctcacttgaagccaagagtttgagaacagattggacaacaaagtgagatcccatctcnacaaaaaanaaannannnannnanngcagtacttgcctgtagtccaagctactcaggaggctgaagagggaggatcactccaaggccaggagttaaaggctacagtgagctataatcacaccactgcactccagcctgggtgacagatcctttttttaaaaaattaaatactttctaaaaagcctttgaaaactcaaagaaagctgnnnnatccttanancttgatncactattaaagccaaggtttattcccattaactaagccacctggaaaagtttaggaatagcagaaacactgccatnnntnncntnnnnnnnnnnancncnanaaaggnngnnannnncctgctccggctgcgagagaagcttctccttcttggagatctanaagcagaaanaggaaaattaggctcatcatcaattagtatttatggcgtgaggcatttcccaacttttcaatctcactgttgggcccagtgaatgtgccgaagaactggcacccatcgtccaaaaaaaaaaaaaaaaaaaaaaaagaaaaaaaaaaaagaaaaaaaagg

SEQ ID NO: 294 - DNA, 833 bp, Homo sapiens
  modified_base (61)..(62): a, c, g, t, unknown, or other
  modified_base (64)..(64): a, c, g, t, unknown, or other
  modified_base (66)..(68): a, c, g, t, unknown, or other
  modified_base (70)..(70): a, c, g, t, unknown, or other
  modified_base (72)..(75): a, c, g, t, unknown, or other
  modified_base (77)..(81): a, c, g, t, unknown, or other
  modified_base (83)..(83): a, c, g, t, unknown, or other
  modified_base (85)..(87): a, c, g, t, unknown, or other
  modified_base (89)..(90): a, c, g, t, unknown, or other
  modified_base (92)..(96): a, c, g, t, unknown, or other
  modified_base (98)..(98): a, c, g, t, unknown, or other
  modified_base (102)..(104): a, c, g, t, unknown, or other
  modified_base (251)..(251): a, c, g, t, unknown, or other
  modified_base (314)..(314): a, c, g, t, unknown, or other
  modified_base (325)..(326): a, c, g, t, unknown, or other
  modified_base (343)..(343): a, c, g, t, unknown, or other
  modified_base (348)..(348): a, c, g, t, unknown, or other
  modified_base (350)..(350): a, c, g, t, unknown, or other
  modified_base (354)..(354): a, c, g, t, unknown, or other
  modified_base (362)..(362): a, c, g, t, unknown, or other
  modified_base (368)..(368): a, c, g, t, unknown, or other
  modified_base (387)..(387): a, c, g, t, unknown, or other
  modified_base (401)..(401): a, c, g, t, unknown, or other
  modified_base (404)..(404): a, c, g, t, unknown, or other
  modified_base (486)..(486): a, c, g, t, unknown, or other
  modified_base (636)..(636): a, c, g, t, unknown, or other
  modified_base (697)..(697): a, c, g, t, unknown, or other
tttaaatgctggaaaaagtagatatttaatgaaaaatggattaggtactataaaaaaattnnantnnntntnnnntnnnnncntnnntnnannnnnanattnnnttcttctgtttcattaaacactcccaagtcttcaagttctctcattcgctgtctacgcatcttcttcatgtcatccattttttgaagtacagcttcagcagtgttagttataagtttgtcaaacagcatggactggtttacaccacntataacgacttctaatcctacaacttcgacgcacttcaacatcaccattatcttcatgtaagntgttctgtacnnttgaacgatgtttctangcccncnatgnaccgagtnactggnatcactttgtcttctctgngctcttcttttttnttnatcagcctgctgtctggccaactgccttgtaaaatgcctgccattagcaagttgctccgttatttccacattcttctcaaanctagaatctgaagaattctgtgcatcttttctcaaagatcttaaagcacgtgtccggtggtaggtttcaacttccttaactgatgacccatcgcccgctttggctgtggtcgccgcgggtttcttctgcgccgcgccggccgagcggagncgcctccggccgatgtgctccagactgaggaagtcactggacaggtccaaggagcccgtgnccgaggccgcggagtggttgtgcagctccaagctgctgcggagaaccaccatcttctctccctactggcctcggcgtgcgcgaccggagagagatccagctccaggcgctcgcagctctggctcttccgcgctccc

SEQ ID NO: 295 - DNA, 1424 bp, Homo sapiens
  modified_base (472)..(472): a, c, g, t, unknown, or other
  modified_base (479)..(486): a, c, g, t, unknown, or other
  modified_base (489)..(496): a, c, g, t, unknown, or other
  modified_base (500)..(505): a, c, g, t, unknown, or other
  modified_base (767)..(767): a, c, g, t, unknown, or other
  modified_base (998)..(998): a, c, g, t, unknown, or other
  modified_base (1006)..(1006): a, c, g, t, unknown, or other
  modified_base (1261)..(1261): a, c, g, t, unknown, or other
  modified_base (1389)..(1389): a, c, g, t, unknown, or other
  modified_base (1391)..(1392): a, c, g, t, unknown, or other
  modified_base (1395)..(1396): a, c, g, t, unknown, or other
  modified_base (1413)..(1414): a, c, g, t, unknown, or other
  modified_base (1421)..(1422): a, c, g, t, unknown, or other
taataatcaataatttcttattttaaaaagtagtactatttaatataatcaagataggagatttaaaatgagcaagtgattcatttgctcttttaaagaagcccgttgacttacgcttttaaaaaagaagttggtgggttacctcaattattgttcatgcttaaacatatccatttgtacaggcttatttctacgtgggacccaatcatatatactatatttctcaaataatttttctaaaactctggcctatattctaaacacttgaccaacaccttagttattgaataggtaaccatttttaaagtacatgtggttcattttttaaaattcaatctctcaagaccgttagatatttaataatttaagctgataagggtatcaaaatgcacattaactttgatcatcatgatttaagttgtaactttgtgttattatataaatattaggttgtttataaatatattgcagnaaagtannnnnnnnaannnnnnnnaaannnnnngactgtggtttagagttatatatttttgcttatttttaaacttcaattattccattcttctgccttataataaaacttttaaggcagagaactgaactaattatagaatttctcctttggagagttataatgttacatagtgaacattcttataaaagaaagaataagtttaagttgatgaatatttagctgcaaagattttttacttaaaaaaatccatgaatatctttgattttattataaagcatttgtaaattatttncatttgagctgtaagattcataaacatttacatttcccaatgatttctattttgatttttaaaaaatatacagggcaagctacatttttaaagcattaatcaacaactttattatattacacattccagtgcacaaacacacaatatcatttaatactcacagtagtacctgtgaaatatatcagatggatattcctatctctattttacagcagaggaaaccgaaattcngagaactnacatttctaaggttgtacagctgcaaaatgaccaaattgtgaagtccctaacatccaggttttcataatgccagtactctttctatgacatgtttatgaccctccaaatgtaccaaaactacctaactaattcactgagaggaagccaactgcaaaaataggatttttaaaagtacaatagagtattactacattttatggatttcagacaaagaaacctccgtttattatatcctgatggtgagtattgccagntctaaattattcatatttctaagaccaaggaaaatataggtaaatgaaaattttgaaataaagaacaatgccttaatttgtaaaatctatcattgctaccaccctgcccaggtctggccatttgccananntgnnggtaaataaatacaatnnctgatannaa

SEQ ID NO: 296 - DNA, 714 bp, Homo sapiens
  modified_base (2)..(2): a, c, g, t, unknown, or other
  modified_base (362)..(362): a, c, g, t, unknown, or other
  modified_base (455)..(455): a, c, g, t, unknown, or other
  modified_base (629)..(629): a, c, g, t, unknown, or other
tnacgcacacaaatgtatatttattagcaagaaaaggcgttcacaatatattgataaaagggaaaagttgaagtttcctgccagtttgtgagaggcagctgttgcttagtgatcaataattaagaacacacaggctgtgtggaggcagacacatggatccactaattcactgtgaccttgggttaattgttctaagcctcagtttagtcatctctaaaatggggataaaatagcatccctcatagctgtggttaagtgagattatttgcacattcaattgacaatatttattgaacatctctgtggcagggaaacaaatggttcctgccctctgagagcttccagtctagcaaaaaaaaaantcagaaatcccacacccgtattaaacataaaaataaattacagatgatggtacaagtgatcaaggaaaggtaatggatgtgatgaaactaacnaagggccctgacttgtgctgtcaagaagcctctgaagaagtgacatttaagatgaaacctaaaattatgagagaactgcagctgttacagccaaaggggaaatgatgacatggacaaaggcctcgaggcaggaggagctgctggcagccagctctcggcataagctttggcatncagtaagtgccttgcatactgctgtattgcaattgaaaaaataaggatctggccaggcggacatctgtcaaaccttcctagcaac

SEQ ID NO: 297 - DNA, 498 bp, Homo sapiens
tattttatgtgtggtccaagacaattcttcttccattgtggaccagggaagccaaaagattggacacccctgtctagggcaaggattccaaaagtatgttctgtataaaacttgcatagagattccaggaacacttgttcaaatgcaaattcctggtccagatctcaaagatcagtctctgcacgtttggacatttttaacaagcaaccctcatgatttttatgatccttaagtttgacaattctagggccttggtcttcaaaatgacacatgcatacccttgagaacacaccaacattttcccatgggggtaaggatacatgcatagctctatggaaaccaacttaaagatgtccaatttccatatgtgttgtcctaaaatatgtgctctgatgaggcctcttcagatctaccatttctctttacctcccttttcacaacagccatactccctatcctccaaaaaaaaaaaaaaaaaaaacgggcggcctctcaacc

SEQ ID NO: 298 - DNA, 719 bp, Homo sapiens
  modified_base (28)..(28): a, c, g, t, unknown, or other
  modified_base (32)..(32): a, c, g, t, unknown, or other
  modified_base (49)..(49): a, c, g, t, unknown, or other
  modified_base (74)..(74): a, c, g, t, unknown, or other
  modified_base (77)..(77): a, c, g, t, unknown, or other
  modified_base (148)..(148): a, c, g, t, unknown, or other
  modified_base (167)..(167): a, c, g, t, unknown, or other
  modified_base (184)..(184): a, c, g, t, unknown, or other
  modified_base (186)..(186): a, c, g, t, unknown, or other
  modified_base (693)..(693): a, c, g, t, unknown, or other
  modified_base (697)..(697): a, c, g, t, unknown, or other
  modified_base (699)..(699): a, c, g, t, unknown, or other
  modified_base (706)..(710): a, c, g, t, unknown, or other
gatcctcctgcctcatcctcccaaaatnctgngattacaggcataagcnaccgtgcctggcctctttaataatnttnaaaataccctaaaggcttgtgaatatacaagtctactgataaattatgtattgtctgggaatttgatagtnattgttttagataactggnttttacgctgtggtagncnggctgtgacactagtgttgcacaggtgtaattggtcatcctatgccttcaccagaataacttgggagtggtgccagaaactagagtctacaattctcactgtttagagagtgttaatgacatactgtgtatgcataatagccgcatgtactataatagcccttaaaattaaactattgggattgctgtaaatattttaaagtactggaggtgccttttacctgtttattagattttgaaaaggtttaaattatttcatgagcaatcttttaaatttcatttaacataaagctgaaaattcaataacaggataaaaaagctttttaacaaggctgccatttaacttaaatgtgttcatcttagctttcacttgtataaaatttgattctttgaactgcagcaataaaaccctcagctcctaagaagtcttaagagggtattctatatattctgctttgttttattttctgtaaattttgtaggtaaatatgtgcattaaaaataaatncttnanatataannnnnaaaaaaaaa

SEQ ID NO: 299 - DNA, 469 bp, Homo sapiens
  modified_base (394)..(394): a, c, g, t, unknown, or other
  modified_base (426)..(426): a, c, g, t, unknown, or other
tttttttatattccagtaaaactttatttagataaataaggagctagacagattttgcccatggaccatagtttgatcatggccaacctatgatctaaaccaaagtccctaggcaagttgcaatagaaaagttgtgtgagacagtgagattttgcctttgttattcaatggcaagctagcccatgctgacacagaaattggtcccttgttttttaaaatgctaaaatactgaacactggcttaatggttagctggcaggcattcaggaaattgctatcagaagatggaagaaataacttacacaagggtaatttatattatggaaaggtgaaactgccccttgagataacctgaaaggcagatcatctaccctttactaaagaaaaagacaganaaacaaaatattttgtagttgctgttcactgnacttgacaaaacgtacagaagagatgaactcagaaaagactgg

SEQ ID NO: 300 - DNA, 539 bp, Homo sapiens
ctttttttttttttttagaggctgtaaagacttttctttattgttcatttattctgttcccttatataagctaggtattaggctaggtatggaaatacaaaaaggaataagataaggcagctgccttcaaggatctcactgtctagggaaggggaaacacaaatatctcaacaccattgagtgagtgtgatgatagagatacgcattcagtcaacaaacatgtcctatgtgctgggtgctgtgctaggtgctgaagatacaatgaacgaagcaagcatggtccttgaattcaccgagctcctattcctgtgcccgcggctcggctcctcctcgctcgcgctgccccagccggggctgaggtaccgggccgggtccccggcgccccgagtctccgccccctcctcctcgtcctccaactcgtccacgtcctcggcctcctggatggcgacgcggatctgcaccgccgtcttgggcccgggccgagcctccccgccggactgggccatggctcgcgggactgcggcgccgccggggtcctc

SEQ ID NO: 301 - DNA, 508 bp, Homo sapiens
  modified_base (72)..(72): a, c, g, t, unknown, or other
  modified_base (413)..(413): a, c, g, t, unknown, or other
ttttttttaaatccaaattctattatttattgagtagtagccacaatcaagtcattgggtttctatgaaccncagtccatctcatataaagtgataatgatgatagctaacatgtactagcacttaatatacaccgggtaccattctaagggcctcaaatggataacataatttattcttcacaaaaatgttctgaaatgagaagtatgagtgtccctactttacagaagaggaaactgaggcatagagaggttagggaacttgggaatggtggagccaagaattgaactcaggcagtctgcctctggggatcttagcccatgtgtggtaacaatacttacctcaactatatcatagagtttctaggagttgcattagaaaatgagtataaaagcatcttttaaaccataatntattagtcttggaaatactgagcaagatgctgaatctcaagttgtaagctttttttttcttttctttttttatttagagacagggtctccctctg

SEQ ID NO: 302 - DNA, 387 bp, Homo sapiens
  modified_base (385)..(385): a, c, g, t, unknown, or other
ttttttcagatatcagccttaggatcagctttattatgtattttaccttcaccagggagaagaaggcaaggaagctggagaacagaccagcctgcatcacacagacacaaatcacatctctaaagagtgtacatggtgagaactaagggcccacattagaccagctatgaagcacagagattgacaagggcaccaaacatccatcttatctttcccttctggttgtttggattcaatcgtttacatactttcggttcattttaaaaaagcacaaccaacatttcaaagttcaataatttgctgttctttttagtgtacagagacaaaatcaccaaatttttgatttttgaaacaccgcaagccgctttgtctcaacacctgtggngg

SEQ ID NO: 303 - DNA, 820 bp, Homo sapiens
  modified_base (3)..(3): a, c, g, t, unknown, or other
  modified_base (21)..(21): a, c, g, t, unknown, or other
  modified_base (28)..(28): a, c, g, t, unknown, or other
  modified_base (30)..(30): a, c, g, t, unknown, or other
  modified_base (36)..(36): a, c, g, t, unknown, or other
  modified_base (38)..(38): a, c, g, t, unknown, or other
  modified_base (45)..(45): a, c, g, t, unknown, or other
  modified_base (48)..(48): a, c, g, t, unknown, or other
  modified_base (86)..(86): a, c, g, t, unknown, or other
  modified_base (141)..(141): a, c, g, t, unknown, or other
  modified_base (148)..(150): a, c, g, t, unknown, or other
  modified_base (152)..(152): a, c, g, t, unknown, or other
  modified_base (154)..(155): a, c, g, t, unknown, or other
  modified_base (161)..(161): a, c, g, t, unknown, or other
  modified_base (166)..(168): a, c, g, t, unknown, or other
  modified_base (170)..(170): a, c, g, t, unknown, or other
  modified_base (305)..(318): a, c, g, t, unknown, or other
  modified_base (320)..(322): a, c, g, t, unknown, or other
  modified_base (324)..(328): a, c, g, t, unknown, or other
  modified_base (330)..(331): a, c, g, t, unknown, or other
  modified_base (625)..(626): a, c, g, t, unknown, or other
  modified_base (629)..(629): a, c, g, t, unknown, or other
  modified_base (641)..(641): a, c, g, t, unknown, or other
  modified_base (647)..(647): a, c, g, t, unknown, or other
  modified_base (697)..(697): a, c, g, t, unknown, or other
  modified_base (713)..(713): a, c, g, t, unknown, or other
aantctttactcagtagaagncagctancnggtgcnanaataaanaanagatacctaacccaataaaggcaaaatcttagttatantaaccagcaaggtacatattacattattattactagaccatgcctccaagtgtgncaaattnnnananngtgttnagcannnanaaaatatacattaaagatttctctcatcataggcacaatctaatacaaaaatatatttgacatttataagttagaagatccattgagagcctccaaaataggacaggggaaggaatgagtgatgacaacataaannnnnnnnnnnnnntnnntnnnnntnnttccacttatatgattattttcttcatcagcaaagggttaagagcagtttacaccaaaccaagttaccaagcagatcacaatcagttcacaggttggataagtcacggcacgcaggccagaaaatgtactcagacttcagtcaacctaatgggacagtgtactcacactgtggttttgttgttttggagtctagaagctccatctacccattctccatggtctaccaccatgttaacacagatttaccacaggcgccatctgtaccaagcctaggatagactctttaaaaaaannaangacctggccggncacagnggttcatgcctgtaagcattttgagaggacaaggtgggtggatcatgagntcaggagttcaagacnagcctggccaaggtggtggaaccctgcctctactaaaactgcagaaagtagccaggcacgtcggtaggaacttgtaatcccagctactggcgaggtcgaccgcccgc

SEQ ID NO: 304 - DNA, 562 bp, Homo sapiens
  modified_base (15)..(15): a, c, g, t, unknown, or other
  modified_base (285)..(285): a, c, g, t, unknown, or other
ttttatctttaaccnatctcgtttattttttgtatatacatctacatacattttatacattatattcatatatacatatatacaaatgtatatatgtttaaagccacgctataagaggaagtaaatgagaaacagacaaatgaagtggtagctggaggacgtgggaatcagtacaggttttcacgcctgtttcagaaatgggagattctacagcacgctcgacactaacacatcacatccataacatatcacatccaatagacaggacagccaaaaacacaaaanaaaaaaagaatcaaatacccacacccagacacaatactcaacaacacaaatacccgaccaaagtctttaagaaagcaaaagaggctgggcacagtggctcacacctgtaatcccagcactctaggaggccaaggtgggtggaccacttgaggtcaggagttcgagaccagcctggccacatggcaaacctcgtctctactgaaaatataaaaattagccaggcatggtggcacacgcctgtaatcccagcagtttgggaggctgaggcaggaggctc

SEQ ID NO: 305 - DNA, 428 bp, Homo sapiens
  modified_base (157)..(157): a, c, g, t, unknown, or other
  modified_base (191)..(191): a, c, g, t, unknown, or other
  modified_base (237)..(237): a, c, g, t, unknown, or other
  modified_base (249)..(249): a, c, g, t, unknown, or other
  modified_base (258)..(258): a, c, g, t, unknown, or other
  modified_base (262)..(262): a, c, g, t, unknown, or other
  modified_base (271)..(271): a, c, g, t, unknown, or other
  modified_base (276)..(276): a, c, g, t, unknown, or other
  modified_base (288)..(288): a, c, g, t, unknown, or other
  modified_base (302)..(302): a, c, g, t, unknown, or other
  modified_base (304)..(304): a, c, g, t, unknown, or other
  modified_base (381)..(381): a, c, g, t, unknown, or other
  modified_base (386)..(386): a, c, g, t, unknown, or other
  modified_base (395)..(395): a, c, g, t, unknown, or other
ttttggaaaagaaatattcctaataattcatttaatcatctggagagtgggttgaagttttgtaaaatttaatttcttcattatagactgtattattttaataaaagcttttctttggtgtcacccattgtgtgcagcactgagctggggccctggnagctctcactattgtccatctggccgcaccactntcagcactgctttcaatgaactgtaacagaatactgatgactcagncatttctgctgnctgacaggnaagntccttgagncgagntctctttgtagnttcctccaagaaangnatgctcaggcactccttgggtgaacagctgcaggccatggagaggacaaccgggttgcaagtagtaagtttgcactngggcnatcccagangctagaacaaggggaacaggtcagcccctagag

SEQ ID NO: 306 - DNA, 418 bp, Homo sapiens
  modified_base (108)..(108): a, c, g, t, unknown, or other
  modified_base (245)..(245): a, c, g, t, unknown, or other
tttcttttcttttttttttttttttttgttttttgccagaagtatgatccagttgtcagtaataagatatacagggagacaggctaggcatcctctaggaatactttngctttctagataaacaacaataggaacacaacagtatcttttcttcttcctgactcaaatgcaatggacacaatgacttcaagccttgacagccattcagtaaccgtgagaaccacttgctgcttagaatggcagancagaaacacacagagcctggcccttgctggaaccactgtgcaaacgaaccatgtcgtgcaaggaaaaacaaaccccaatctgtttaaggccttgttggtcaagttttctatttacttgcaggtgaaaatgttcctatcagaaaaaggaattattatggataggatgaccaagt

SEQ ID NO: 307 - DNA, 637 bp, Homo sapiens
  modified_base (9)..(9): a, c, g, t, unknown, or other
  modified_base (11)..(11): a, c, g, t, unknown, or other
  modified_base (13)..(13): a, c, g, t, unknown, or other
  modified_base (68)..(69): a, c, g, t, unknown, or other
  modified_base (77)..(77): a, c, g, t, unknown, or other
  modified_base (155)..(155): a, c, g, t, unknown, or other
ttttgtttntnanaaatttttatttatttaaagaaataacattggttattgattagatatatatcatnntggtttanggtatgagatatagtgtccaatgtggtattattagtttaatatatatctacttgtggcaatagtgaacagtttcaagngatgaatacataatttaaagggggagaacgacataactgcacgttcatttcaatgtctgagtttgataaccaaaagtactttcattttttagataaaaattttctatttcccaaatctcaagacctggatacaaaatgtagagctgcagatttaaggcctgaatggctggagtagcaggtgttacctgaacatttgtgaacattttaccaagagaaaaaaggggaaagtggagattctcatgtctacatgtgtactcaatgaacacatgttactctgattaggtttgtgggccccatggtctccgaatcagtttcaggtctgaagataacaagagtcattgagggaaataaaacgattgattgttgcccagtgaagttggtagaaattaggatgaactatgtatgacatggtgctgtaaattcttctacttgtggactaattttggtgaccatctgtctaatcatcttaaatccttgagttt

SEQ ID NO: 308 - DNA, 534 bp, Homo sapiens
tttttttttttttttttttttttaggaatgaaaggtcataagccattagaaatagtggcattattatgcaataacaacaccctagctaacctgcttttgtcatctgtagcacttacaataaagaatgatgaccttccaaccctggacactacctcgataaagcaaaccagagatcctctctacactttctatggaagccataaaagttgccatcaatatatccactttcatagttctatacttttatactttctagacttttttatagactttatgatcagatctttttgtctcagaggataggttttgcaagattcaaaggaaaatcaaactccttggttgttccagctttgaagcttttgcttcagtaaatttgtttaaagaaccagatcacataccatttatcaaattctttacttaagtcagaatactttgcagacatacatatttggaaaacaaactgtttcttgttcactagatagaatctgtattgtagtaagaaactacttacaaggtggctttctttctgctttg

SEQ ID NO: 309 - DNA, 499 bp, Homo sapiens
  modified_base (89)..(90): a, c, g, t, unknown, or other
  modified_base (358)..(397): a, c, g, t, unknown, or other
aaaccccttctccggtgtgtgcaatgggttgaagcttgtttcctggagccagaagaggggttttcttcttttctttcctttcttttttnntttttttttttttttttaaatttttggtcgtgcacctggcttgtccccgagcgtaatattcttcaatggaaacggatctaataggtgtgagtgtgtgtgtgtcctatgctcgcgtgtgtgatgggaggtataaataaatgagtgccggtgcggcggtgtctatggccgcgctctgtgtctccgagcccctaacactaatgtcgggatcaaagggcagcggcggcggcagcacagctcacagctcgctctcttgctctctctctctctnnnnnnnnnnnnnnnnnnnnnnnnnnnnnnnnnnnnnnnnctctctctgtcacacacacacacacacaagaggcacagactgagggaaagagcgagagctacacacacacacacgcacgcacacacacacacagagcaaaga

SEQ ID NO: 310 - DNA, 645 bp, Homo sapiens
  modified_base (4)..(4): a, c, g, t, unknown, or other
  modified_base (234)..(234): a, c, g, t, unknown, or other
  modified_base (249)..(249): a, c, g, t, unknown, or other
  modified_base (315)..(315): a, c, g, t, unknown, or other
tttntttttattgtcactggatgtttattaagtattttagtttcataacttattttcataaaccttttgttcactatttgtttgggtaaatctcatcaaatttaaacacccgagactcttaaatgttctggagttttgtgggaaagtaaacacctatttgtaagtattgatatgtaaaaagttcaaattttagtatatgaccaactacaatttgcatttctctaccaagtaacnctctataatggaatntcactgtaaaacagacacttatgtccagcacaaataaagttcacaataattgtttatcacaagtanacaatcagcaaacttaatgttttacttataataaatacatgccatatacttagattctagaaagtcatcactcactacttctttgtggtaggtagcttcacagagactgtgaaacagatcatggaaagaaactgattttaccatgtgcgaagttaaagtgaaccacgtatcactcagcgcacggtggctcacgcctgtaaacactgctttagctgcatcttgtaagttttggtttgttgtgtcttcattatcacttcatctcaaggggtttgtaatttcccttaagaattttttctttgacacattttttttttttggtgttaatgacag

SEQ ID NO: 311 - DNA, 507 bp, Homo sapiens
  modified_base (13)..(13): a, c, g, t, unknown, or other
  modified_base (421)..(421): a, c, g, t, unknown, or other
  modified_base (423)..(428): a, c, g, t, unknown, or other
  modified_base (430)..(431): a, c, g, t, unknown, or other
  modified_base (449)..(449): a, c, g, t, unknown, or other
  modified_base (451)..(461): a, c, g, t, unknown, or other
  modified_base (464)..(465): a, c, g, t, unknown, or other
  modified_base (468)..(468): a, c, g, t, unknown, or other
  modified_base (491)..(491): a, c, g, t, unknown, or other
ttttttttttttngaggttttaggcacatatttattttattttttttaatataaaagtaaaagagtacattgttgagtagaggattaaaggagtgacgaccctttctaaagtggggtctcccatcccggatccctaagactgtaacatctgctacatacattaaaaacaaaacaaaacaaaagcaaacatgaaacttatgacctgacttcactccacccttcatgcctgcattatgacagaaacacgtcccactgctcctacttatgtatgtacatccagagctccaaacctaagctgtggccccctcctcccagccctacccacatccaccctacttcccaaaagcctgtagaagcccccacttagaaaaaaaggcagacatacacatacacagaaacacatatctatctgcagctcctncnnnnnnannccctgaaacatacacacncnnnnnnnnnnntcnnctncttatggcacagatgggacaggntggcctttcccctgtt

SEQ ID NO: 312 - DNA, 4259 bp, Homo sapiens
  modified_base (104)..(120): a, c, g, t, unknown, or other
  modified_base (326)..(357): a, c, g, t, unknown, or other
  modified_base (956)..(958): a, c, g, t, unknown, or other
  modified_base (967)..(967): a, c, g, t, unknown, or other
  modified_base (998)..(998): a, c, g, t, unknown, or other
  modified_base (1036)..(1036): a, c, g, t, unknown, or other
  modified_base (1110)..(1110): a, c, g, t, unknown, or other
  modified_base (1114)..(1114): a, c, g, t, unknown, or other
  modified_base (1116)..(1116): a, c, g, t, unknown, or other
  modified_base (1149)..(1149): a, c, g, t, unknown, or other
  modified_base (1167)..(1167): a, c, g, t, unknown, or other
  modified_base (1296)..(1296): a, c, g, t, unknown, or other
  modified_base (1368)..(1427): a, c, g, t, unknown, or other
  modified_base (1430)..(1431): a, c, g, t, unknown, or other
  modified_base (1433)..(1433): a, c, g, t, unknown, or other
  modified_base (1435)..(1437): a, c, g, t, unknown, or other
  modified_base (1579)..(1579): a, c, g, t, unknown, or other
  modified_base (1606)..(1628): a, c, g, t, unknown, or other
  modified_base (1860)..(1907): a, c, g, t, unknown, or other
  modified_base (1965)..(1965): a, c, g, t, unknown, or other
  modified_base (2007)..(2007): a, c, g, t, unknown, or other
  modified_base (2189)..(2189): a, c, g, t, unknown, or other
  modified_base (2228)..(2228): a, c, g, t, unknown, or other
  modified_base (2351)..(2353): a, c, g, t, unknown, or other
  modified_base (2355)..(2356): a, c, g, t, unknown, or other
  modified_base (2398)..(2399): a, c, g, t, unknown, or other
  modified_base (2401)..(2401): a, c, g, t, unknown, or other
  modified_base (2486)..(2486): a, c, g, t, unknown, or other
  modified_base (2516)..(2516): a, c, g, t, unknown, or other
  modified_base (2566)..(2566): a, c, g, t, unknown, or other
  modified_base (2616)..(2616): a, c, g, t, unknown, or other
  modified_base (2651)..(2673): a, c, g, t, unknown, or other
  modified_base (2677)..(2677): a, c, g, t, unknown, or other
  modified_base (2683)..(2683): a, c, g, t, unknown, or other
  modified_base (2749)..(2749): a, c, g, t, unknown, or other
  modified_base (2752)..(2752): a, c, g, t, unknown, or other
  modified_base (2756)..(2771): a, c, g, t, unknown, or other
  modified_base (2931)..(2932): a, c, g, t, unknown, or other
  modified_base (2956)..(2957): a, c, g, t, unknown, or other
  modified_base (2963)..(2963): a, c, g, t, unknown, or other
  modified_base (2974)..(2974): a, c, g, t, unknown, or other
  modified_base (3062)..(3063): a, c, g, t, unknown, or other
  modified_base (3122)..(3122): a, c, g, t, unknown, or other
  modified_base (3328)..(3328): a, c, g, t, unknown, or other
  modified_base (3476)..(3476): a, c, g, t, unknown, or other
  modified_base (3481)..(3481): a, c, g, t, unknown, or other
  modified_base (3483)..(3506): a, c, g, t, unknown, or other
  modified_base (3691)..(3691): a, c, g, t, unknown, or other
  modified_base (3696)..(3696): a, c, g, t, unknown, or other
  modified_base (3730)..(3730): a, c, g, t, unknown, or other
  modified_base (3946)..(3946): a, c, g, t, unknown, or other
  modified_base (3968)..(3971): a, c, g, t, unknown, or other
  modified_base (3973)..(3973): a, c, g, t, unknown, or other
  modified_base (3975)..(3975): a, c, g, t, unknown, or other
  modified_base (3977)..(3977): a, c, g, t, unknown, or other
  modified_base (3979)..(3980): a, c, g, t, unknown, or other
  modified_base (3982)..(3984): a, c, g, t, unknown, or other
  modified_base (3986)..(3992): a, c, g, t, unknown, or other
  modified_base (4016)..(4016): a, c, g, t, unknown, or other
  modified_base (4024)..(4024): a, c, g, t, unknown, or other
  modified_base (4043)..(4043): a, c, g, t, unknown, or other
  modified_base (4066)..(4066): a, c, g, t, unknown, or other
  modified_base (4081)..(4081): a, c, g, t, unknown, or other
  modified_base (4102)..(4102): a, c, g, t, unknown, or other
  modified_base (4122)..(4122): a, c, g, t, unknown, or other
  modified_base (4127)..(4128): a, c, g, t, unknown, or other
  modified_base (4131)..(4131): a, c, g, t, unknown, or other
  modified_base (4144)..(4144): a, c, g, t, unknown, or other
  modified_base (4161)..(4161): a, c, g, t, unknown, or other
  modified_base (4170)..(4170): a, c, g, t, unknown, or other
  modified_base (4185)..(4185): a, c, g, t, unknown, or other
  modified_base (4187)..(4187): a, c, g, t, unknown, or other
  modified_base (4189)..(4189): a, c, g, t, unknown, or other
  modified_base (4209)..(4209): a, c, g, t, unknown, or other
  modified_base (4213)..(4213): a, c, g, t, unknown, or other
  modified_base (4218)..(4218): a, c, g, t, unknown, or other
  modified_base (4224)..(4224): a, c, g, t, unknown, or other
  modified_base (4227)..(4227): a, c, g, t, unknown, or other
  modified_base (4231)..(4231): a, c, g, t, unknown, or other
  modified_base (4233)..(4233): a, c, g, t, unknown, or other
  modified_base (4246)..(4246): a, c, g, t, unknown, or other
gtcagtatggaggaggcggaccttgagggagagtaggaattggattgcaagaggaaggagagccttctggccagcagcagccagcagcagtgggggaggctggnnnnnnnnnnnnnnnnngggggctggggcataaggaggggcctgcctgtgaagatcatatgggccaggctgtggagggccaggcatgcccgccgggagtgcagctggtccacgggaagcatctggagtggctgggaatgggcgcaggagcagcgccgtgggagcacaggtctctttcccggggcggctcacctggtgtcttggttcctgcaagccttgaaaannnnnnnnnnnnnnnnnnnnnnnnnnnnnnnnaactccaccccaccccggagggtccagactcccctactccgagccactgtggccagctccacccagaaattccaggacctgggcgtgaagaactcagaaccctcggcccgccatgtggactccctaagccaacgctcccccaaggcgtccctgcggagggtggagctctcgggccccaaggcggccgagccggtgtcccggcgcactgagctgtccattgacatctcgtccaagcaggtggagaacgccggggccatcggcccgtcccggttcgggctcaagagggccgaggtgttgggccacaagacgccagaaccggcccctcggaggacggagatcaccatcgtcaaaccccaggagtcagcccaccggaggatggagccccctgcctccaaggtccccgaggtgcccactgcccctgccaccgacgcagcccccaagagggtggagatccagatgcccaagcctgctgaggcgcccaccgcccccagcccagcccagaccttggagaattcagagcctgcccctgtgtctcagctgcagagcaggctggagcccaagccccagccccctgtggctgaggctacaccccggagccnnnaggccactnaggcggctcccagctgcgttggcgacatggncgacacccccagagatgccgggctcaagcaggcgcctncatcacggaacgagaaggccccggtggacttcggctacgtggggattgactccatcctggagcagatgcgccgnaagncnatgaagcagggcttcgagttcaacatcatggtngtcgggcagagcggcttnggtaaatccaccttaatcaacaccctcttcaaatccaaaatcagccggaagtcggtgcagcccacctcagaggagcgcatccccaagaccatcgagatcaagtccatcacgcacgatattgaggagaanggcgtccggatgaagctgacagtgattgacacaccagggttcggggaccacatcaacaacgagaactgctgnnnnnnnnnnnnnnnnnnnnnnnnnnnnnnnnnnnnnnnnnnnnnnnnnnnnnnnnnnnncannancnnnaagaagcgcatcccggacacccgcgtccactgctgcctctacttcatccccgccaccggccactccctcaggcccctggacatcgagtttatgaaacgcctgagcaaggtggtcaacatcgtccctgtcatcgccaaggcgnacacactcaccctggaggagagggtcnnnnnnnnnnnnnnnnnnnnnnnagacctgctgtccaacggcatcgacgtgtacccccagaaggaatttgatgaggactcggaggaccggctggtgaacgagaagttccgggagatgatcccatttgctgtggtgggcagtgaccacgagtaccaggtcaacggcaagaggatccttgggaggaagaccaagtggggtaccatcgaagttgaaaacaccacacactgtgagtttgcctacctgcgggaccttctnnnnnnnnnnnnnnnnnnnnnnnnnnnnnnnnnnnnnnnnnnnnnnnncttcgaggcgtaccgtgtgaagcgcctcaacgagggcagcagcgccatggccaacggngtggaggagaaggagccagaagccccggagatgtagacgccnccctgcccacccccgggatcctgcccccaagtcatttccgtcccccccccaggccctcccaccaccccattttattttatatgattttctccatttgtcatcgttccccaccccttcgacatgctgccaggaaacaagggaaggggcctccctccgagtgagtcagtgatgaggccgcggcntccccgaggttgtggggaggctgcactggagccacaggnaggggtgagagcacccactgaattgacatgaccctctgtccccaggcctggctccccgagggctcagaagagcagcttcggtgtgcagatcatccgtccgtgtggggttctcagtgccggagnnntnngggtgggggccaggcctcgcacttgcagaggagcccagtggnntncacgctcccctccatccccatcggccctgtcccctggagtgtgtcagagcccaggggagaatgcagcccaccaggagcacctggnaccccctgcccgccacatggtgtggccatncactcagcccctacccctgccctgctcctaagggtagaaaactccagggntcccctgccaccgactgcccagccactccaagccccctggcagctgcccntcctggagcagaaagtgcctttatctcagccatcnnnnnnnnnnnnnnnnnnnnnnngggnacaggntggaatgagggaggcgtcttcatctccctgccatccccctctcacgccacccccgcccccaccggnctngcannnnnnnnnnnnnnnntgggatctgattgaggataaaaaggaaggagagatgacccctaccccctcatcccccagttttgaaaaggtctaagcaagtgagtctggtggaggagctgagggagggagccatggaaggtgccagaaggaaggttggcgggggcacgtgtgggccgtgnnttgggctggtcagagtggcgtganntgcccnggcgcctgccntgcccaagtgaccagggaagtgtgtgtgtgtccatgtgtatgcgtgtccgtctgtctgtctagtgtctgggtttggcccaagactggnntgtagttacattaatgcccagccagccacccctgccactcacccctcctggcccaggcnttgctgactctctgagctggggaggtgggaggccaggcgagcctgactctgttgatctacccgtgcctgggcccctcccctcagagcccatggtaacgaacccctagaaaggagagaacgggcgtcaggggtgcacagtccacagctgaagagcaaggtttcgtggcagcacggcccggcccctcaccctctgtccccacgagggnacccatgggggctgtctttgcagggcacagatgaccaaagtcccttcctgcttcctgttacctgtcttgctcctggggagaaagaggggcctgatgagactccactcaggtgcacacatcaccaggtgcatctgcaggcaccgggctnggctncnnnnnnnnnnnnnnnnnnnnnnnngaaggagtgtatgagtgtgagtgtgtgtgcatggaagttggggcactgggcgtctgactccctccccacccaagagaggaaggacccctcaccacccccactggcgagacagtttactttgccgacttgccatgtttttgccaaaaccaagattttgaaggaaatgagtggccagcgccagggcnccagnccatgtggcctgcccagcctcaatgtcacttggnggcggggtggggtgggggtgggcagcagcatcccagccttgagatgcttcactttccttctctgtaaccagactttgaaaaattgttcgtttcatcaggctctgttcctcaatggccttttgctacgtgcctcccgagaaatttgtctttttgtataaatgacaaagtgttgaaaatgtatttcctgaaataaatgtttcaaatgcagaaacccanaaaaaaaaaaaaaaaaaaaaannnnanananannannnannnnnnntgtacaaaaggggtcctgctgtgnttgttaantcagtttcccctcttggtnaccctagctggaagagggggggncccggtacccaattngcctataggtgagccgatttnaatttaatggccgtggtttnaacgnngtncttggaaaccctngggttcccacttattgntttagaaanccctttgcacttggnantnaagggccgccgttgcttcanagtnccgtnatgggntgnattnangtaatttttaaanggaattttaaaac

SEQ ID NO: 313 - DNA, 3835 bp, Homo sapiens
gcataagtttttttttcttaaaaaaacggcatctgcttaaagggatttatgactaaaattgcttatttttctacagagttgtctgctggttctcagcttgaagaagattctgaagtccttattgatcctttttcttggcgttaccattttttgaagcaaagttaacctagctttctagtttgagctttctttttggccgtctttaaaaaaaattttttttttaatctataaaatagacaagagctagttctacaatgtccaagtcattccagcagtcatctctcagtagggactcacagggtcatgggcgtgacctgtctgcggcaggaataggccttcttgctgctgctacccagtctttaagtatgccagcatctcttggaaggatgaaccagggtactgcacgccttgctagtttaatgaatcttggaatgagttcttcattgaatcaacaaggagctcatagtgcactgtcttctgctagtacttcttcccataatttgcagtctatatttaacattggaagtagaggtccactccctttatcttctcaacaccgtggagatgcagaccaggccagtaacattttggccagctttggtctgtctgctagagacttagatgaactgagtcgttatccagaggacaagattactcctgagaatttgccccaaatccttctacagcttaaaaggaggagaactgaagaaggccctaccttgagttatggtagagatggcagatctgctacacgggagccaccatacagagtacctagggatgattgggaagaaaaaaggcactttagaagagatagttttgatgatcgtggtcctagtctcaacccagtgcttgattatgaccatggaagtcgttctcaagaatctggttattatgacagaatggattatgaagatgacagattaagagatggagaaaggtgtagggatgattctttttttggtgagacctcgcataactatcataaatttgacagtgagtatgagagaatgggacgtggttctggccccttacaagagagatctctctttgagaaaaagagaggcgctccttcaagtagcaatattgtagacgttcattggactcttaccgaaagggttatccccatctgtgctctatatgtgattggccaggtcattctaataaggagtggagtcaacatatcaatggagcaagtcacagtcgtcgatgccagcttcttcttgaaatctacccagaatggaatcctgacaatgatacaggacacacaatgggtgatccattcatgttgcagcagtctacaaatccagcaccaggaattctgggacctccacctccctcatttcatcttgggggaccagcagttggaccagaggaatctgggtgctggaaatggaacctgcaaggacctagacacatgcagaaaggcagagtggaaacttagcagagttgttcacatcatgggtttttcaacggaggaaaaaactttgagataccagctattacagctggtagaaccatttggagtcatttcaaatcatctgattctaaataaaattaatgaggcatttattgaaatggcaaccacagaggatgctcaggccgcagtggattattacacaaccacaccagcgttagtatttggcaagccagtgagagttcatttatcccagaagtataaaagaataaagaaacctgaaggaaagccagatcagaagtttgatcaaaagcaagagcttggacgtgtgatacatctcagcaatttgccgcattctggctattctgatagtgctgttctcaagcttgctgagccttatgggaaaataaagaattacatattgatgaggatgaaaagtcaggcttttattgagatggagacaagagaagatgcaatggcaatggttgaccattgtttgaaaaaagccctttggtttcaggggagatgtgtgaaggttgacctgtctgagaaatgtaaaaaactggttctgaggattccaaacagaggcattgatttactgaaaaaagataaatcccgaaaaagatcttactctccagatggcaaagaatctccaagtgataagaaatccaaaactgatggttcccagaagactgagagttcaaccgaaggtaaagaacaagaagagaagtccggtgaagatggtgagaaagacacaaaggatgaccagacagagcaggaacctaatatgcttcttgaatctgaagatgagctacttgtagatgaagaagaagcagcagcactgctagaaagtggcagttcagtgggagacgagaccgatcttgctaatttaggtgatgtggcttctgatgggaaaaaggaaccatcagataaagctgtgaaaaaagatggaagtgcttcagcagcagcaaagaaaaagcttaaaaaggtggacaagatcgaggaacttgatcaagaaaacgaagcagcgttggaaaatggaattaaaaatgaggaaaacacagaaccaggtgctgaatcttctgagaacgctgatgatcccaacaaagatacaagtgaaaacgcagatggtcaaagtgatgagaacaaggacgactatacaatcccagatgagtatagaattggaccatatcagcccaatgttcctgttggtatagactatgtgatacctaaaacagggttttactgtaagctgtgttcactcttttatacaaatgaagaagttgcaaagaatactcattgcagcagccttcctcattatcagaaattaaagaaatttctgaataaattggcagaagaacgcagacagaagaaggaaacttaagatgtgcaaggagatttaatgatttcaaagaaaataatggttctttgtttttaatgttaaccttttttaaatacaatactgatagttagaagaaaactattgtactcttttgttttagtggagaaataatagatgtctgttcatgtgttaagtgttatagcaaaaaaaatacacatatggttaagttaatgaatagtttttgttttatcagaatggcaacagacagaagtactttgtagagattgacttcctaagctacttaagacaacttgcaccactaagaaaaaaatgtagaaccatttggaaaaatgaaatttagtagttccaagtttcaaagaaatgtcaacattttattccattcaataaagaacaaaaccaatagtgtttttattactttcatctgaaacattccatgttttaatctgagccttgcagactttcatttggagtttgaacccgttttggttgcatttcatttttggagaacttaattaacgtgagattggcaattgaaatgcaggtgcagttttctgttaatgtcatgctgttgtttaggtaataagaaatattaagtaattggctttagattttgtaatttttttccctgagttcctgctagatttcgtattctagtagtcaatgtattttcagtgaaatgcaaaaatattcccattatctttgaccagtattaatttttgagatcttactgcttgtcacttgaatcccgtgattgtcatacatctctggtataagcaacatttgatttttgaagtgtgtagaccatctcttcatattttcaagatgtaattttacatttctgcatttttaaaacagtttggccataatcctagatgcacgcttctaattcatgtacctgcacatgtgacctttgtgaacagaaatttgcatgtataatttgtgtttacttgtaactttctggttatatactgcttatatctgtggattcaagttactgaagtgaataccaataaaaagaaaaccctaggccatgttaaaaaaaaaaaaaaaaaaaa

SEQ ID NO: 314 - DNA, 2056 bp, Homo sapiens
ggaaccgcggctgctggacaagaggggtgcggtggatactgacctttgctccggcctcgtcgtgaagacacagcgcatctccccgctgtaggcttctcccacagaacccgtttcgggcctcagagcgtctggtgagatgctgttgccgctgctgctgctgctacccatgtgctgggccgtggaggtcaagaggccccggggcgtctccctcaccaatcatcacttctacgatgagtccaagcctttcacctgcctggacggttcggccaccatcccatttgatcaggtcaacgatgactattgcgactgcaaagatggctctgacgagccaggcacggctgcctgtcctaatggcagcttccactgcaccaacactggctataagcccctgtatatcccctccaaccgggtcaacgatggtgtttgtgactgctgcgatggaacagacgagtacaacagcggcgtcatctgtgagaacacctgcaaagagaagggccgtaaggagagagagtccctgcagcagatggccgaggtcacccgcgaagggttccgtctgaagaagatccttattgaggactggaagaaggcacgggaggagaagcagaaaaagctcattgagctacaggctgggaagaagtctctggaagaccaggtggagatgctgcggacagtgaaggaggaagctgagaagccagagagagaggccaaagagcagcaccagaagctgtgggaagagcagctggctgctgccaaggcccaacaggagcaggagctggcggctgatgccttcaaggagctggatgatgacatggacgggacggtctcggtgactgagctgcagactcacccggagctggacacagatggggatggggcgttgtcagaagcggaagctcaggccctcctcagtggggacacacagacagacgccacctctttctacgaccgcgtctgggccgccatcagggacaagtaccggtccgaggcactgcccaccgaccttccagcaccttctgcccctgacttgacggagcccaaggaggagcagccgccagtgccctcgtcgcccacagaggaggaggaggaggaggaggaggaggaagaagaggctgaagaagaggaggaggaggaggattccgaggaggccccaccgccactgtcacccccgcagccggccagccctgctgaggaagacaaaatgccgccctacgacgagcagacgcaggccttcatcgatgctgcccaggaggcccgcaacaagttcgaggaggccgagcggtcgctgaaggacatggaggagtccatcaggaacctggagcaagagatttcttttgactttggccccaacggggagtttgcttacctgtacagccagtgctacgagctcaccaccaacgaatacgtctaccgcctctgccccttcaagcttgtctcgcagaaacccaaactcgggggctctcccaccagccttggcacctggggctcatggattggccccgaccacgacaagttcagtgccatgaagtatgagcaaggcacgggctgctggcagggccccaaccgctccaccaccgtgcgcctcctgtgcgggaaagagaccatggtgaccagcaccacagagcccagtcgctgcgagtacctcatggagctgatgacgccagccgcctgcccggagccaccgcctgaagcacccaccgaagacgaccatgacgagctctagctggatgggcgcagagaacctcaagaaggcatgaagccagcccctgcagtgccgtccacccgcccctctgggcctgcctgtggctctgttgccctcctctgtggcggcaggacctttgtggggcttcgtgccctgctctggggcccaggcggggctggtccacattcccaggccccaacagcctccaaagatgggtaaaggagcttgccctccctgggccccccaccttggtgactcgccccaccacccccagccctgtccctgccacccctcctagtggggactagtgaatgacttgacctgtgacctcaatacaataaatgtgatcccccaccc

SEQ ID NO: 315 - DNA, 2262 bp, Homo sapiens
gctgcgccgccattaagagctagccctcagaactatcctctctaaggtttcacagtcctgcccaagatggccgtctcggctctggcaccgcccccactcctgcctctcccaacatggcgaccctgagtctccgttcccggtgcggaacgtacgaccggaagtgacggggtccagaaatttccgctttctttctgcagcaggaaccgcggctgctggacaagaggggtgcggtggatactgacctttgctccggcctcgtcgtgaagacacagcgcatctccccgctgtaggcttcctcccacagaacccgtttcgggcctcagagcgtctggtgagatgctgttgccgctgctgctgctgctacccatgtgctgggccgtggaggtcaagaggccccggggcgtctccctcaccaatcatcacttctacgatgagtccaagcctttcacctgcctggacggttcggccaccatcccatttgatcaggtcaacgatgactattgcgactgcaaagatggctctgacgagccaggcacggctgcctgtcctaatggcagcttccactgcaccaacactggctataagcccctgtatatcccctccaaccgggtcaacgatggtgtttgtgactgctgcgatggaacagacgagtacaacagcggcgtcatctgtgagaacacctgcaaagagaagggccgtaaggagagagagtccctgcagcagatggccgaggtcacccgcgaagggttccgtctgaagaagatccttattgaggactggaagaaggcacgggaggagaagcagaaaaagctcattgagctacaggctgggaagaagtctctggaagaccaggtggagatgctgcggacagtgaaggaggaagctgagaagccagagagagaggccaaagagcagcaccagaagctgtgggaagagcagctggctgctgccaaggcccaacaggagcaggagctggcggctgatgccttcaaggagctggatgatgacatggacgggacggtctcggtgactgagctgcagactcacccggagctggacacagatggggatggggcgttgtcagaagcggaagctcaggccctcctcagtggggacacacagacagacgccacctctttctacgaccgcgtctgggccgccatcagggacaagtaccggtccgaggcactgcccaccgaccttccagcaccttctgcccctgacttgacggagcccaaggaggagcagccgccagtgccctcgtcgcccacagaggaggaggaggaggaggaggaggaggaggaagaagaggctgaagaagaggaggaggaggaggattccgaggaggccccaccgccactgtcacccccgcagccggccagccctgctgaggaagacaaaatgccgccctacgacgagcagacgcaggccttcatcgatgctgcccaggaggcccgcaacaagttcgaggaggccgagcggtcgctgaaggacatggaggagtccatcaggaacctggagcaagagatttcttttgactttggccccaacggggagtttgcttacctgtacagccagtgctacgagctcaccaccaacgaatacgtctaccgcctctgccccttcaagcttgtctcgcagaaacccaaactcgggggctctcccaccagccttggcacctggggctcatggattggccccgaccacgacaagttcagtgccatgaagtatgagcaaggcacgggctgctggcagggccccaaccgctccaccaccgtgcgcctcctgtgcgggaaagagaccatggtgaccagcaccacagagcccagtcgctgcgagtacctcatggagctgatgacgccagccgcctgcccggagccaccgcctgaagcacccaccgaagacgaccatgacgagctctagctggatgggcgcagagaacctcaagaaggcatgaagccagcccctgcagtgccgtccacccgcccctctgggcctgcctgtggctctgttgccctcctctgtggcggcaggacctttgtggggcttcgtgccctgctctggggcccaggcggggctggtccacattcccaggccccaacagccttcaaagatgggtaaaggagcttgccctccctgggccccccaccttggtgactcgccccaccacccccagccctgtccctgccacccctcctagtggggactagtgaatgacttgacctgtgacctcaatacaataaatgtgatcccccacccaaa

SEQ ID NO: 316 - DNA, 3667 bp, Homo sapiens
  modified_base (3)..(8): a, c, g, t, unknown, or other
  modified_base (14)..(23): a, c, g, t, unknown, or other
  modified_base (64)..(68): a, c, g, t, unknown, or other
  modified_base (399)..(399): a, c, g, t, unknown, or other
  modified_base (2090)..(2090): a, c, g, t, unknown, or other
  modified_base (2170)..(2170): a, c, g, t, unknown, or other
  modified_base (2257)..(2257): a, c, g, t, unknown, or other
  modified_base (2445)..(2445): a, c, g, t, unknown, or other
  modified_base (2529)..(2529): a, c, g, t, unknown, or other
  modified_base (2550)..(2554): a, c, g, t, unknown, or other
  modified_base (3592)..(3594): a, c, g, t, unknown, or other
  modified_base (3596)..(3596): a, c, g, t, unknown, or other
  modified_base (3598)..(3598): a, c, g, t, unknown, or other
  modified_base (3600)..(3600): a, c, g, t, unknown, or other
  modified_base (3602)..(3603): a, c, g, t, unknown, or other
ttnnnnnntttttnnnnnnnnnnttttttttttttttttttttttttttttttttttttttttnnnnntgcataaaacaagtttaatttccaaccagggtcacagtcatcgcgttatcccacattttgagcaaggatagagaaggtgagttattaaacatatacagtctacattccagaggaggaactgcagttaccactataacaccacagacaaactttggggtggggggagcgggagtcctcaggaagcagaaagctggaatcagggaaagcataaaattaaacctaccagagaggagaggagagggagtgggcagaaatggaatgaaacacccaatcccaaaagagctgttaagtgaatgggaatgtagaaaggaccacccctgccaagggcttnagcagccagggatactaccaagatcacttactgccccctgctggacagatctggggcagcaccaaggcaacctcctaacatttccagccccagattggtccctggagcccccaaaaaaacaaggtgaggggtgaggcctgaagtgaggaaaacctatttaggactgacatctaactagagaaagtcagggaatgaggcaggagaagaggcaaagtcctcatgaaccacaaagatagagtggaaaatcctaagtaggaaaaaatacatggaaaagggcaaatgagcaacagcagtgaatgagttgagattgaaaaggaaagagttcaaggaaggagaggcaatggggcaagacaaaataaatctgaggaaacagagcaaataaaaagtatggagggaagcatctgtggggccagggaaatgaatacatttttaaatgaaatagaacctccaacaccccccccacaaccaccacacacaaacacacccacacccatatacacacacactcacacacacacacaggcctagagagcaagatacctgcacacacctgctgcatcctgggtaacacatcactaagtaactggcactgagggagatacccctggaacctctctttcacagttcaatcttggatggggttactaatattgatccatctgctatcaacaaaagtggccaggaaacctggccccatggagtggggcttgggacagccctactgggaaggggtccctcagccatgctgtggggggccctgggccctgaccttagcaggttatgggcagctgtctcggagctcagggcgcagccagcacacacaggagcccacaggacagccacgtcttcacagaaactacagaagtcaggacccaggcgaggacctcaggaacaagtgccccctgcagacagagagacgcagtagcaacagcttctgaacaactacataataatgcggggagaatcctgaagaccactgcatcccacaagcactgacaaccacttcaggattttatttcctccactctaacccccagatccatttatgagaagtgagtgaggatggcaggggcatggagggtgaagggacagcaaggatggtctgagggcctggaaacaatagaaaatcttcgtcctttagcatatcctggactagaaaacaagagttggagaagaggggggttgatactaaggtcagctatgtcaccccacttcccagctcctcattagaatacccagtcagccctggtcaggccagtaggagtactagggtgagaaaattctgaccaaggacagatgacccatccaacccctaagatcagaagggtggtggggcactggaaggcaggaatgggattggcccatgcctcaccttctcctaataacaaaagagaatgaagatggaaaacctcaggccttcgcctcccttcccccaatgccctgggtccctaacacacaccatggacttgccatccccaccccccagtcaagctccagaggaacagatctgaagatggtggggaaggatcagttgaacactctaagctgataagagtgagtgggttcctctctccttcccaacagtaaggcagagcagagtggcatctccttgggaacagtcatctagagataaatgccatcctccagccctaagaagggtggagagaagagtacaaggaaaatggtggtgnagaatccatcatctgtcctatcatccagaaaaacctacctgcagagaggagggtaaccagtcaaagactggggcagtccngcttgactaatgccctcccaccttcttcccttaatctcaccaacacggaaggggcagatgacaggctccagtgggcagtgtcctggnctgcaagccctgagcttcactccaccccctccccgctccccccggcccccacaaatatatctctctatacatgtatatacaggcgcacacatgcacgcaaacacagagaggcccgtgcaatttccatgtaaaacagggagagggtggcaaaggaaaggcaaacagggagtagaagggcttgtgggganagggaaaggactcagatgccaagaggacagcaaccactgccaaacaaagagaataccccactcgacctcccgaaacccagaggntgagagagagagaggggccannnnntgaaaccgtaacaactttttgttttaaatccagtaaattggaatgactcatcatcaggacagcaattagggattggtcatataggtggacaggaaaaaggaggggaggcaggggaggcaaggctcttgctgggcatgtggacatgatacccagggccctggccacacttgcatggagaggaaggggtaggactggggcagggtgacagtaggtatgtcaggggtgggtggggtgctttgttagggctgtctggctttcacttcttgtttttgagctgattggccagccagtccaggccttcgtacagcccgtccccgctggtggcacaggtggcctgaatgtaccagttacggtgacgaagggaatgcaggcccagcttgtctgtgatctcagcagcgttcatagcattaggcagatcctgtttgtttgcaaagacaaggagtacagcatcccggagctcgtcctccgccagcattctcatcagctcttcccgggcctcatttactcgctcccgatcattgctgtcgaccacaaatatcaacccttgggtgttctggaagtagtgtctccagaggggtcgaatcttgtcctggccacccacatcccacactgtaaagctgatgttcttatactccactgtctccacattgaacccaatggtagggatggtggtgacgatctcccccagtttcagcttgtataggatggtggtctttcctgcggcatccaggcccaccatcaggatgcgcatctccttcttcccaatcaggctcttgagaaggtttccaaagatattgcccatgatcacagcagctgctttctggggacagtggggcccaagtaggggcagtggcagtctggttttggcctggtccctggtatggaagacttgatcctgttcctgctatcagctgcgccgctgcggccgccgcctctgccccgcaggttccgctccgctccctctggctccccaagccgacttcagcccggctgctgcctggcccactccccggctccctccttccttccctccacctnnncncngnannccgcgacggcgactggagctgtgcggcgtacccccacccccagcccgggatacttcccacctcc

SEQ ID NO: 317 - DNA, 1890 bp, Homo sapiens
gacccacgcgtccggggaggagaaagtggcgagttccggatccctgcctagcgcggcccaacctttactccagagatcatggctgccgaggatgtggtggcgactggcgccgacccaagcgatctggagagcggcgggctgctgcatgagattttcacgtcgccgctcaacctgctgctgcttggcctctgcatcttcctgctctacaagatcgtgcgcggggaccagccggcggccagcggcgacagcgacgacgacgagccgccccctctgccccgcctcaagcggcgcgacttcacccccgccgagctgcggcgcttcgacggcgtccaggacccgcgcatactcatggccatcaacggcaaggtgttcgatgtgaccaaaggccgcaaattctacgggcccgaggggccgtatggggtctttgctggaagagatgcatccaggggccttgccacattttgcctggataaggaagcactgaaggatgagtacgatgacctttctgacctcactgctgcccagcaggagactctgagtgactgggagtctcagttcactttcaagtatcatcacgtgggcaaactgctgaaggagggggaggagcccactgtgtactcagatgaggaagaaccaaaagatgagagtgcccggaaaaatgattaaagcattcagtggaagtatatctatttttgtattttgcaaaatcatttgtaacagtccactctgtctttaaaacatagtgattacaatatttagaaagttttgagcacttgctataagttttttaattaacatcactagtgacactaataaaattaacttcttagaatgcatgatgtgtttgtgtgtcacaaatccagaaagtgaactgcagtgctgtaatacacatgttaatactgtttttcttctatctgtagttagtacaggatgaatttaaatgtgtttttcctgagagacaaggaagacttgggtatttcccaaaacaggtaaaaatcttaaatgtgcaccaagagcaaaggatcaacttttagtcatgatgttctgtaaagacaacaaatccctttttttttctcaattgacttaactgcatgatttctgttttatctacctctaaagcaaatctgcagtgttccaaagactttggtatggattaagcgctgtccagtaacaaaatgaaatctcaaaacagagctcagctgcaaaaaagcatattttctgtgtttctggactgcactgttgtccttgccctcacatagacactcagacaccctcacaaacacagtagtctatagttaggattaaaataggatctgaacattcaaaagaaagctttggaaaaaaagagctggctggcctaaaaacctaaatatatgatgaagattgtaggactgtcttcccaagccccatgttcatggtggggcaatggttatttggttattttactcaattggttactctcatttgaaatgagggagggacatacagaataggaacaggtgtttgctctcctaagagccttcatgcacacccctgaaccacgaggaaacagtacagtcgctagtcaagtggtttttaaagtaaagtatattcataaggtaacagttattctgttgttataaaactatacccactgcaaaagtagtagtcaagtgtctaggtctttgatattgctcttttggttaacactaagcttaagtagactatacagttgtatgaatttgtaaaagtatatgaacacctagtgagatttcaaacttgtaattgtggttaaatagtcattgtattttcttgtgaactgtgttttatgattttacctcaaatcagaaaacaaaatgatgtgctttggtcagttaataaaaatggttttacccactaaaaaaaaaaaaa

SEQ ID NO: 318 - DNA, 2493 bp, Homo sapiens
aactgagggggtggctagcagcaaacaagtatggagctagcacaagagctaagaaataacctccatccctaccactcagcacacaacccctacggtcccagcacactgagccctggctcccaagggctgcctcctgacagctccgtcatggcactttttaacgcttcagcaacaaacaccaggcagctgttgccactggcctcctacccctactctggggcttgggggtcactccccccaggacttaccttccaaaacaaactttcttcactttgtattataggtacaagacagcgacttacgtatcttttctcctcctccctagtgttcctccccattttttcagaaaacacttctgactcctgtcccttccccttctgcttttggtcagtccctgttcttgagcctcttttctcctctccccaggatgcagaaagtggtgaacccaggaactgaggaaggaggtttccagttcatttacattaagggccctgggggagaataaagctcagagcaggagggagtaaggaaacatttcctttttgtttttatttggttggagtttctcatatttgaaaacattgcggtatccatgatttggccttgtggagggtgttcctaggtagaggtgagaatggggaggcaagatctcaggcaccaggcaggaggtgccttgtaagctaactgggcggaggtggaggtgcagtgtcaactgtggctctgtaactcttcaaaggcccagtttcccctcacgcagcctcttaggtagcgtttcccctaatcgtgggggttggaccccagagtcttccaaagaattttcactggttgcctgcatctttggctctgctgtgatctgattggaggagggacagtttctggtacccatcctctgatttatacatatgcattttttcccctctggcctttagatggcctcagccccagccaccatatacccctgcagtttgcactttaattgatggtagttcagttggggtacttgttttatggaagttttgattgatttacttgccctcccaccttctttttaattcaatgaaatctgaggttaatgcgaggttcgaggagaggttatagataaaactaccagtggcagctactcaagtcctatctccactgttagcttcctccaactctaattattaacctatattcttgccaagctaactattgactataggtttgcctttcctggagaattaattgagcaattgaggagtgtctcaggatagcacaggccaaggtaggggagtaaaaaggaggtcaggcaaaagggaggagttttctgtcctttcccaggtttcacactcaatttgatatccattaccatgtcttttctacttccttgtaaataggtatgatctttattcccactgtacagtctgttctatcctctgcctcccatcaggccctgtttctttgttcctttgttaatatcttgaatttagtccctccatccttaatccccccatccctccccatcatgcaaccagtggtttaatccatgtaccaataggggctagtaccacagaggcctcctgtggtgccctcgtatcataccacctgttcctgtggagagggaatgaccggcactgaaggtaccttacaactggctcatattatcagaggaccttggtcctttctaaatctctagtctctcttcatatccttcatcaggtgttttaagatgtctctgagaagccatcaaggcaaaagagaactttaagttccttgttccagcccggagttttgggaaagaaagaaaggaaaggtcacagtgacctaggattggaaccttcctgcccttttggcttgcagactgccttctatcccagaacagctgagaaatctatgaagctgagattctgaaggacccagcttaggttcttccacttaaggcctcaattcccttccttttccaaggggcagccttagttcccatggccctgaaacacacacatttcccccttcctttcccagaagccactggccccccatagcacccagtgcatcctttttacaagtggaagaactaggatggctttccaaagtcttctagaaatgaagttctttctctgtgcagctttcccccttggagcaggagtgaagatgtttcattatcttgggcctgggaaaccacttccccaggcttctccctccccccacccccataggaacaggatttggccttagcttcgtgggcctatcggctgccttccctctacttcctaccacctcttctgccttcctttgagctctgttgggcttggggatcttagttttcttttgtttatttcccagctcatttttttcttctggtcagtttttttaagggggggtgttgtggttttttgtttttgttttgcttctgagaaagcatttgcctttcttcctctcccaacataacaatcgtggtaacagaatgcgactgctgatttaccgatgtatttaatgtaagtaaaaaaaggaaaa

SEQ ID NO: 319 - DNA, 3500 bp, Homo sapiens
agaatttgtttgtaaggtatgggaaggtcggtggcgagtgatccctcatgatgtactaccagactggctcaaggataatgacttcctcttgcatggacaccggcctcctatgccttctttccgggcctgttttaagagcattttcagaatacacacagaaacaggcaacatttggacacatctcttaggttgtgtatccttcctgtgcctggggatcttttatatgtttcgcccaaatatctcctttgtggcccctctgcaagagaaggtggtctttggattatttttcttaggagccattctctgcctttctttttcatggctcttccacacagtctactgccactcagagggggtctctcggctcttctctaaactggattactctggtattgctcttctgattatgggaagttttgttccttggctttattattctttctactgtaatccacaaccttgcttcatctacttgattgtcatctgtgtgctgggcattgcagccattatagtctcccagtgggacatgtttgccacccctcagtatcggggagtaagagcaggagtgtttttgggcctaggcctgagtggaatcattcctaccttgcactatgtcatctcggaggggttccttaaggccgccaccatagggcagataggctggttgatgctgatggccagcctctacatcacaggagctgccctgtatgctgcccggatccccgaacgctttttccctggcaaatgtgacatctggtttcactctcatcagctgtttcatatctttgtggttgctggagcttttgttcacttccatggtgtctcaaacctccaggagtttcgtttcatgatcggcgggggctgcagtgaagaggatgcactgtgatacctaccagtctccagggactatgaccctaaaccagggcctgcggcacttgcgggcctccctgctggctactgatgccagtaccagaggagccccaaaactttgacagcctcgtgggctttgtgacggcccaggggctctgcgtggtacatgactgagaagagaaaaacaaaaataaatcatacctcaaaggatggagtgcatcaattgggagaaaaggagacatagcccaaaccctggcttattcttgggatctactgattgcgggctctgcaagacccttggcaaactggcttctgatccatatcatatttatttgtagaagatggcgaaacagtttagctggtggttctttcttctccctttctctctctctatgacaataatacaaaccaatttaagtgaacatttatatccgataaggggtgggagtgtgattttaaatgctcttttgggagaacaaagaaattaatgtaaataagatttctaactgtttaaataagactttatataaatgtttaaaacataggggtaagggagggagggagaatttttgtatagaatgaaacatgcaagtaccacacactgtttgaattttgcacaaaaagtgactgtaggatcaggtgatagccccggaatgtacagtgtcttggtgcaccaagatgccttctaaaggctgacataccttggaccctaatggggcagagagtatagccctagcccagtggtgacatgaccactccctttgggaggcctgaggtagaggggagtggtatgtgttttctcagtggaagcagcacatgagtgggtgacaggatgttagataaaggctctagttagggtgtcattgtcatttgagagactgacacactcctagcagctggtaaaggggtgctggaggccatggaggagctctagaaacattagcatgggctgatctgattacttcctggcatcccgctcacctttatgggaagtcttattagagggatgggacagttttccatatccttgctgtggagctctggaacactctctaaatttccctctattaaaaatcactgccctaactatacttcctccttgagggaatagaaatggacctttctctgacatagttcttggcatgggagccagccacaaatgagattctgacgtgtccaggtttctcctgagctcatctacatagattggtagacccttcctttggattaggaaagatgagttttacctctggtacactgtcttggtaagcctggatgtgacagacacctcggctctccttgaataagaaagccagcagaactcttaaagccagttgtagtacggagttgtcagcactcactgaacctcactttacagggataagagtggtgtggcattttaaatacaatggtatgttattgccagggagtgaggtacaagacgatggctcatgtcacaggcctacctgatacggtgtcagagaaagtggtggggaaaggatctggttcatggaattctgatcttggcccataggtgaaccaccaaaatagtgctcgagtcttaggttactgtcatcaaagacttgggatgactccattatatcctggggttgtgggtattagaactaaatatggaggtcctgagcatggggactggtgtcctcagtaggtgtttgggaatatgggaagggtctcctatttattcaatagagttttctcagttattttcctccctcgcccttgcaatctccagcaaaaggtgggatctaggaagaaagaatccagtgtagaagttgagaagaacttgaacgttttggttctggataaggtcactgtcctaggtgctaggtggaccgagcaaaagactcagtggatgaactggtgcagtgcctgacagaataaagaacagtattaatccctttgagaaagcatagtccagcaggacagtggccatttggacagaagcccacttagtttcttgggagcaacagcacgtatcagaagccagacttgctcttcggtcatgcactttgggatacagcgtataggtgcagccctgtcacaacaccaacagaagtagcagcctctgggtgcagtcacccacaccccaaagctggaaggatctggttcaacatagcacaaacccttaggaaaaatgaaattaacatcactgatgtgtaatccagtaaaatctccctttttcgggtgtgtatgtgggcatgtgcccatttctatgtgtgtgtctacgtgcagctcactaccaacagcctcatgtgcacttgacctgacagtgctcgctgagaactctcaccaggttggcgcctgaatgccttactctcagcagtcagaggcttgcttgctctgtgcagatttttaattttcttttttggccctaggctggttgggacctctacagcttcattctttcacattaaatagtgacctttttcagtattttccctcttcccctttataaattatgctaaagccacaaagcacatttttggggatcatagaaggttggggttccagaaaggcatctgtgtgatggttccattgatgtgggatttccctacttgctgtattctcagtttctaataaaaagaaccaaatgaaaaaaaaaaaaaaaa

SEQ ID NO: 320 - DNA, 3650 bp, Homo sapiens
  modified_base (9)..(10): a, c, g, t, unknown, or other
  modified_base (17)..(18): a, c, g, t, unknown, or other
  modified_base (536)..(549): a, c, g, t, unknown, or other
  modified_base (3166)..(3166): a, c, g, t, unknown, or other
  modified_base (3530)..(3530): a, c, g, t, unknown, or other
  modified_base (3532)..(3532): a, c, g, t, unknown, or other
  modified_base (3536)..(3536): a, c, g, t, unknown, or other
  modified_base (3538)..(3538): a, c, g, t, unknown, or other
  modified_base (3541)..(3543): a, c, g, t, unknown, or other
ttttttttnnttttttnntttgcatatcacaaagttttattaatgtaattttaaggccaattaaactaattttattcaaagtaagtctacattaaattacaatattaacaatctctagacacaacgaacttataagaaaaaaaaatagaaatctgtttggtctttcttagaccacatatcatggaactcataaatgaaaattttcaaagatagaaatgacaattaaagagtgaggattttaatatggaaacccacaaggtgtcatatttcaaacccgcatgtttcaaaaagagactcttaataatttagcacaaaatcaaattatataaacttggtatattccagaaaatattgctttaaacacttatgccatgatcaaaattcctttggtagcttttaatcaaaatgaaacatgctattatgtaaaatataaagtacttttaaatgttatctcaaaagtatctttgtcatagttacccttctaacatcactactgaactttcctttcactgttcaacctcatgtatatatacacnnnnnnnnnnnnnntaccaacaaaatccttttaatctttccacaaaataacctctgcttcacaacatcaagactttaagtctccataaactttttacagtttacagcagagaacaaggatcgtccctgcgcatgactgtaaaaaccaaaccaaactttattattgcaatcacacaaatactgcaattaaaaaaaatcaaagagcagttaccccaatgcaaaaaaacagggactgccagactcaatcttagaatggaaacacaaacacactagccccaaaccctaaaacagagattcacaaggaactcagctgacgaacagacgcagcagggcggacaccatggccttggcacctcagggagctcacttagaaacctgacttacgaaaaatcagccatcaaagtttacaacttttggaaatacatgaaacagagaggggccagtggctagggtgcgtcatccattcgccagctttgaaccctggctctttctaatgttcacccatgaagggcccttgttttcactctaaatgctgatcatctgagcgagctgtcttcagggatacctaaggaatcttcagagctaaaaaatgcagcatctagggtcttcttcattgtgcactcatgatcacacacgagaacaaaccaaacttgcagctttttgacacaagaacaagaccttttaaaggaacttctctttagtaacatcttcttgtccaatctcaaagttattttgcacagagtaacagaaacaatttaaatgcctaaaagaactagaggaaaaactggagggaaaaagatacatctgcaggttgaagtcttgagccttgtgaaagatgacccaggagccacctcccttccttcgccttccaatgtccacagctggatcaatcagagtcccagaaatggcacaggtgtgcttcctgctctgagggtacattctagtgtttcatgaaggggaaccgtctgcagatgcgtcaggccacgtagtggtactgattcggattgtctttgtctctctccatatagtctctgtctatcagagattcaattctctttttcaaatctccaggctttactggaaatttcagctgattatataattcagaaactagaagattatgaccaagagtctttctcatcttcattattctgacgatagcagcatcaatctgatattgtctatcctgaaacactctctcagtggtgctaacctgttcctcaacagtttccttcatctgaatttgattgatctttattctaaacaacttgtgcttgaactctccattaaaaatgaacttgtctccatcttccacttcctttcctttgggacttttaatcagcacacgtgctttgccacaggccagggactgcagcgttctgcgcaattcactatcctctatccccgtggccatttttatctcctcaaagctgaagccatctccctcgttgaacatgaggagcaccagtgtctggaagagggacacctggaattccttcttcccttctttaaactccgcttttaaaacagcatgtcccaaagtagtttgccactgaagttttcgaccactgtgctttccaagataaaatgccttaaatacttcctgaagtttaatcatttctggggttaagtgcacttccatgggcgtgtatgttggccagtagcccattgtgagtatgttcactgtgaggtctatagggcctgagtcactctgattctgcatatgctgcttgaaatgaaccatgatgtccttcgaaagctccatgtccttgaacatgccttccagcttgctggtgaaggctgcaccgcactcatgcttgagctttgacaacatagacttttcagcatcgactgaggcacttttcccaacaaggagtctttttgccaaatcttttttataaaatgcttcaaagacatctttaccgtggataaacctgaacaggatcatgatcttgtccaacgtccgctccagctcctcgtctgtggcttctttgttgcctgctcttaactttgaatccacatgctttgcgatcagttctgcaggcttgttgggtctcttgttgatgaacgtctcaaaggactccttcatcaggttgacgaaccgctcattcttctggaagcagacctcgatcacgtggtccaccttgtccttgaagtccaacaggtcttggaccatgtctttgtctttctcaggattgattacgatcgctgttccaaaagtcttgatgtactcgctccagtgctgcagcagcgcctgctgcccgcccctcacccggctgaacagctggtacatctgtgcgaggtccggcactctgttctcatccagtaagtggtcgagccctttctgcagaattgctgttaaatgttctcctaatagctgtttctccacacaagcaatcagtggtttctgtgtgctgtggtccaagtaagtgattactctgtctccctcttcctctaagcgtttacttacatggttaagatattctggaacctctctttcctgcattaacctttggccttcggcagcatataagcaattagtctcttccaaaaatttcagttcaaatgaatctttatacacctgcaggtcagacagcatgcccaggaggctccgcaacaggctccggtccanggcctcgccgctcctctcgcgctcgatcagcagtaggattccatcaatggttttactctgaaccattttatcactaataatatgggttctaaacagttctaatcccatatcccagatggagggcagcgtggagttctgcagcacataggtgcggtccaagaacaggaagatgcttctgatcatgatcatttgtctgcagtggtcctgccagcacgtgttaatcttctttaaaaataaaacactatctagtgagtcttctctaaacggaaggatctgtgcctggacgtggtcttcacaggcctgacgcagttgcttgtagagcattggggagactttgtgagaacagagattttccacagcctgntngagntnctnnnctgcacggcccgcaccgcctcgtgcagcttccgccacgtgtcctgcgtgtagttgtcgggcagccgaggtctgtaatcagaaccgctggcgtcccggctgagaagac

SEQ ID NO: 321 - DNA, 2519 bp, Homo sapiens
  modified_base (26)..(28): a, c, g, t, unknown, or other
  modified_base (30)..(31): a, c, g, t, unknown, or other
  modified_base (513)..(513): a, c, g, t, unknown, or other
  modified_base (605)..(610): a, c, g, t, unknown, or other
  modified_base (612)..(614): a, c, g, t, unknown, or other
  modified_base (804)..(804): a, c, g, t, unknown, or other
  modified_base (806)..(806): a, c, g, t, unknown, or other
  modified_base (808)..(809): a, c, g, t, unknown, or other
  modified_base (812)..(812): a, c, g, t, unknown, or other
  modified_base (814)..(814): a, c, g, t, unknown, or other
  modified_base (1533)..(1533): a, c, g, t, unknown, or other
  modified_base (1823)..(1823): a, c, g, t, unknown, or other
  modified_base (1871)..(1871): a, c, g, t, unknown, or other
  modified_base (1895)..(1895): a, c, g, t, unknown, or other
  modified_base (1898)..(1898): a, c, g, t, unknown, or other
  modified_base (1932)..(1932): a, c, g, t, unknown, or other
  modified_base (1936)..(1936): a, c, g, t, unknown, or other
  modified_base (1938)..(1938): a, c, g, t, unknown, or other
  modified_base (2037)..(2037): a, c, g, t, unknown, or other
  modified_base (2060)..(2062): a, c, g, t, unknown, or other
  modified_base (2470)..(2470): a, c, g, t, unknown, or other
  modified_base (2474)..(2474): a, c, g, t, unknown, or other
  modified_base (2476)..(2476): a, c, g, t, unknown, or other
  modified_base (2478)..(2479): a, c, g, t, unknown, or other
  modified_base (2481)..(2485): a, c, g, t, unknown, or other
  modified_base (2487)..(2492): a, c, g, t, unknown, or other
tttttttttttttttttttttttttnnntnntattaatttcatgtttatttcatacagggtttttgtcaagtttatcagttttaaaatgattaagtcataatcaccattcaaagacaaattttcctctcaaaataataatttccattctgctacctacagtttggcttatcctttggtctgatagccatacttcatctcacaggactatacaagtatgtactatgtacaaaacattttcaagtttgctttcaaatgatacctacaaagagtagatcaagttttcaagtttacagaataccatactacaacaatttaccactataaatatgtcttaacacctgtttattccattctatttagattgcaacactaacaagattcttaatgcatatgtccccaccacctgtactttccctacactatcattttgacacttaacatagaaacaactcaattcagcaaccaagttttacaaccactgttgctaccaatcaaatggtgatgcatcagancccaattctcatgagtattaacatattaagagagtacattatttacctaagactgaatgactgtgccttactttataaaaaaacaaagatannnnnntnnntttaattccatatatatgatactacctattcaatttattaaaaattgtaataaacataataatcaaactagtgctccaaacttatgctgttcacatggaagacaccacaaaagaagacataatatagagacttgccttgcaataagaagtacaaattccttctataaagatggagaaataaaaggacaantntnnttntntaaaagacaattcactgtacacattttatttacagttttgtacactgtcttaatatgaatgggactgcttttctacttgagccatttttaaccaaagcaaaataacctaagtaatacaaagtgttaaaatacagcataaagatacaaaaacagacatactaattctagttaggaatgtaattatgatgttacattttttataatccacaattatgtttaggaaatcacacaaacatagatcactgatttgaatgaaatgcataaatttgtagcaaagctttgtagttacaaaaaacaaaaaaaattaccaaagaatgcacaaaattaatgtttattccacctttgtgtcatattcctggatccttcaccaatgttacatgaggaaaaaaacaaaaaaaatttaagcaaaacaaatgaaaaactgaaatcagaatcactaatattatcaagtagggaaacaaataaattaaaatctagcagccatcagcaagagtacagcaaagacaatgctgtaaaaagaaacaaagaaaattgctagaaaactgtatgcatcataatctttcaaaccagcaaaatatgcttctgcataaaatggaacaacagaattttttttcctgtaaagtatagaaatgccaagttgttttctgactattgtggataggtaaaatctgtatgtaattaatggtaattctactgaactattacagagtgggccaggnaacacatttatggattctggggatgtgtactgtaattctttgattgggatagtggaaactctagccaaaaaaaaaaaaaaaaaatgaacacagaagtacaagacaaaggcgaatgagacttctcttatatctgagtaacattaagatggaaatcaaatttaaatgcagtccactctgctttttgaagaggctttggttcagctcccaaatctcgattgcttgacgcagtctcctatgagaatactcagaaggtgtcttcttaaacaacaaacctatttttagtggtgganccgctcttagtagctgtgtctgcgtgggactgataaccaatcactatnctttggaggaagtcctaacctttnccnttgtataccctccctatatgtgtaacagcttctnctgntntttcacattcagtagtccatattgctatcttatcacctttagctctaacattaacaacagcgccacatacatcatcactgtagtcatcaaaagattctnccaataaggcacagaagtgtctnnnctagccaaaagcgatcgaggtcacttcgtctctgctgtttgttcaatgtaattagccatcgtcctccccgtttgtttttctcatcttcccacataggctcaataccatccttaaaaagtgagtagtcacagccaggcattaaattactagacaactggatatggttgtacagagcccaaaagtcttcaacagtatcaaacttggagatcagccgcaggtttgcttgccaagttttgcttttatcatttttaaaaaaccagagtgcccatctgttctgtaggggatgtttaatatagtgttctgggttagcaacctcctgattagattccgttttctcctcttctgtagtcgggggattaggagtaggggtggtttccggttcgacagtcgccatcttagatcgatctnatcncncnncnnnnncnnnnnncccctcttcggggacgcgcgcgtggcc

SEQ ID NO: 322 - DNA, 647 bp, Homo sapiens
gctcactgagcaccgtcccagcatccggacaccacagcggcccttcgctccacgcagaaaaccacacttctcataccttcactcaacacttccttccccaaagccagaagatgcacaaggaggaacatgaggtggctgtgctgggggcaccccccagcaccatccttccaaggtccaccgtgattaacatccacagcgagacctccgtgcccgaccatgtcgtctggtccctgttcaacaccctcttcttgaactggtgctgtctgggcttcatagcattcgcctactccgtaaagtctagggacaggaagatggttggcgacgtgaccggggcccaggcctatgcctccaccgccaagtgcctgaacatctgggccctgattctgggcatcctcatgaccattggattcatcctgttactggtattcggctctgtaacagtctaccatattatgttacagataatacaggaaaaacggggttactagtagccgcccatagcctgcaacctttgcactccactgtgcaatgctggccctgcacgctggggctgttgcccctgcccccttggtcctgcccctagatacagcagtttatacccacacacctgtctacagtgtcattcaataaagtgcacgtgcttgtga

SEQ ID NO: 323 - DNA, 7560 bp, Homo sapiens; identical to SEQ ID NO: 97

SEQ ID NO: 324 - DNA, 3543 bp, Homo sapiens
  modified_base (79)..(79): a, c, g, t, unknown, or other
  modified_base (98)..(98): a, c, g, t, unknown, or other
  modified_base (124)..(124): a, c, g, t, unknown, or other
  modified_base (453)..(453): a, c, g, t, unknown, or other
  modified_base (468)..(468): a, c, g, t, unknown, or other
  modified_base (478)..(478): a, c, g, t, unknown, or other
  modified_base (487)..(487): a, c, g, t, unknown, or other
  modified_base (502)..(519): a, c, g, t, unknown, or other
  modified_base (521)..(521): a, c, g, t, unknown, or other
  modified_base (531)..(531): a, c, g, t, unknown, or other
  modified_base (535)..(535): a, c, g, t, unknown, or other
  modified_base (562)..(562): a, c, g, t, unknown, or other
  modified_base (1393)..(1393): a, c, g, t, unknown, or other
  modified_base (1923)..(1923): a, c, g, t, unknown, or other
  modified_base (3483)..(3484): a, c, g, t, unknown, or other
  modified_base (3492)..(3492): a, c, g, t, unknown, or other
  modified_base (3495)..(3495): a, c, g, t, unknown, or other
  modified_base (3498)..(3499): a, c, g, t, unknown, or other
ctcgtgccgaattcggcacgagaccgcgtgttcgcgcctggtagagatttctcgaagacaccagtgggcccgtgtgganccaaacctgcgcgcgtggncgggccgtgggacaacgaggccgcgnagacgaaggcgcaatggcgaggaagttatctgtaatcttgatcctgacctttgccctctctgtcacaaatccccttcatgaactaaaagcagctgctttcccccagaccactgagaaaattagtccgaattgggaatctggcattaatgttgacttggcaatttccacacggcaatatcatctacaacagcttttctaccgctatggagaaaataattctttgtcagttgaagggttcagaaaattacttcaaaatataggcatagataagattaaaagaatccatatacaccatgaccacgaccatcactcagaccacgagcatcacntcagaccatgagcgntcactcagancatgagcantcactcagaccacgnnnnnnnnnnnnnnnnnnancatcactctnaccntaatcatgctgcttctggtaaaaatangcgaaaagctctttgcccagaccatgactcagatagttcaggtaaagatcctagaaacagccaggggaaaggagctcaccgaccagaacatgccagtggtagaaggaatgtcaaggacagtgttagtgctagtgaagtgacctcaactgtgtacaacactgtctctgaaggaactcactttctagagacaatagagactccaagacctggaaaactcttccccaaagatgtaagcagctccactccacccagtgtcacatcaaagagccgggtgagccggctggctggtaggaaaacaaatgaatctgtgagtgagccccgaaaaggctttatgtattccagaaacacaaatgaaaatcctcaggagtgtttcaatgcatcaaagctactgacatctcatggcatgggcatccaggttccgctgaatgcaacagagttcaactatctctgtccagccatcatcaaccaaattgatgctagatcttgtctgattcatacaagtgaaaagaaggctgaaatccctccaaagacctattcattacaaatagcctgggttggtggttttatagccatttccatcatcagtttcctgtctctgctgggggttatcttagtgcctctcatgaatcgggtgtttttcaaatttctcctgagtttccttgtggcactggccgttgggactttgagtggtgatgcttttttacaccttcttccacattctcatgcaagtcaccaccatagtcatagccatgaagaaccagcaatggaaatgaaaagaggaccacttttcagtcatctgtcttctcaaaacatagaagaaagtgcctattntgattccacgtggaagggtctaacagctctaggaggcctgtatttcatgtttcttgttgaacatgtcctcacattgatcaaacaatttaaagataagaagaaaaagaatcagaagaaacctgaaaatgatgatgatgtggagattaagaagcagttgtccaagtatgaatctcaactttcaacaaatgaggagaaagtagatacagatgatcgaactgaaggctatttacgagcagactcacaagagccctcccactttgattctcagcagcctgcagtcttggaagaagaagaggtcatgatagctcatgctcatccacaggaagtctacaatgaatatgtacccagagggtgcaagaataaatgccattcacatttccacgatacactcggccagtcagacgatctcattcaccaccatcatgactaccatcatattctccatcatcaccaccaccaaaaccaccatcctcacagtcacagccagcgctactctcgggaggagctgaaagatgccggcgtcgccactntggcctggatggtgataatgggtgatggcctgcacaatttcagcgatggcctagcaattggtgctgcttttactgaaggcttatcaagtggtttaagtacttctgttgctgtgttctgtcatgagttgcctcatgaattaggtgactttgctgttctactaaaggctggcatgaccgttaagcaggctgtcctttataatgcattgtcagccatgctggcgtatcttggaatggcaacaggaattttcattggtcattatgctgaaaatgtttctatgtggatatttgcacttactgctggcttattcatgtatgttgctctggttgatatggtacctgaaatgctgcacaatgatgctagtgaccatggatgtagccgctgggggtatttctttttacagaatgctgggatgcttttgggttttggaattatgttacttatttccatatttgaacataaaatcgtgtttcgtataaatttctagttaaggtttaaatgctagagtagcttaaaaagttgtcatagtttcagtaggtcatagggagatgagtttgtatgctgtactatgcagcgtttaaagttagtgggttttgtgatttttgtattgaatattgctgtctgttacaaagtcagttaaaggtacgttttaatatttaagttattctatcttggagataaaatctgtatgtgcaattcaccggtattaccagtttattatgtaaacaagagatttggcatgacatgttctgtatgtttcagggaaaaatgtctttaatgctttttcaagaactaacacagttattcctatactggattttaggtctctgaagaactgctggtgtttaggaataagaatgtgcatgaagcctaaaataccaagaaagcttatactgaatttaagcaaagaaataaaggagaaaagagaagaatctgagaattggggaggcatagattcttataaaaatcacaaaatttgttgtaaattagaggggagaaatttagaattaagtataaaaaggcagaattagtatagagtacattcattaaacatttttgtcaggattatttcccgtaaaaacgtagtgagcacttttcatatactaatttagttgtacatttaactttgtataatacagaaatctaaatatatttaatgaattcaagcaatatatcacttgaccaagaaattggaatttcaaaatgttcgtgcgggtatataccagatgagtacagtgagtagttttatgtatcaccagactgggttattgccaagttatatatcaccaaaagctgtatgactggatgttctggttacctggtttacaaaattatcagagtagtaaaactttgatatatatgaggatattaaaactacactaagtatcatttgattcgattcagaaagtactttgatatctctcagtgcttcagtgctatcattgtgagcaattgtcttttatatacggtactgtagccatactaggcctgtctgtggcattctctagatgtttcttttttacacaataaattccttatatcagcttgaaaaaaaaaaaaannaaaaaaanaanaanntagcttatagggatataaaaaaaaacttttaggggggggcccca

SEQ ID NO: 325 - DNA, 2489 bp, Homo sapiens
gcacgagggggtagagggaaaagagctccgggccaggggctgccgtcgccgccgtcggggagtcagcccgccagcccgccagctcgtcagcccgccaccagcttcgcgggccctgtcggtcccggtaagcgggcctgcgcttaccggaaagaggagcgtaagatgaaagagtatcagaccaaacattgtctggcttgcactgtaaaactagttagctgaagacgacttctcaggtttcttcaggatgcctgcagcacttgtggagaatagccaggttatctgtgaagtgtgggccagtaatctagaagaagagatgaggaagatccgagaaatcgtgcccagttacagttatattgccatggacacagaatttccaggtgttgtggtgcgaccaattggtgaatttcgtagttccatagattaccaatatcagcttctgcggtgcaatgttgaccttttaaaaattatccagctgggccttacattcacaaatgagaagggagagtatccttctggaatcaatacttggcagttcaatttcaaatttaaccttacagaggacatgtactcccaggattccatagatctccttgctaactcaggactacagtttcagaagcatgaagaggaagggattgacacactgcactttgcagagctgcttatgacatcaggagtggttctctgtgacaatgtcaaatggctttcatttcatagtggctatgattttggctatatggtaaagttgcttacagattctcgtttgccagaagaggaacatgaattcttacatattctgaaccttttctccccatccatttatgatgtgaaatacctgatgaagagctgcaaaaatcttaagggaggtcttcaggaagttgctgatcagttggatttgcagaggattggaaggcagcaccaggcaggctcagactcactgctgacaggaatggctttctttaggatgaaagagttgttttttgaggacagcattgatgatgccaagtactgtgggcggctctatggcttaggcacaggagtggcccagaagcagaatgaggatgtggactctgcccaggagaagatgagcatcctggcgattatcaacaacatgcagcagtgatggcgccaggctctgcagggtgggcctgatcccagagtggtgcttactgtgctgactgtgtacttatcttccccaagagaaaatgcttcttttgagcacactgtacctaccatctgcattgagcagaaagacttttgttttactgaagacaaaagatgtttttattttagacccagaagagaggagtttgctctgaatttgtaaataagtcttccccattcctcatactcgagcctctcctctctggttgcctcctgccaccagcatccatggctcatttgacacctttttaaatatcaggacaagtctgaaacaaagtagtaaaatgtatataactcttacctgttgtcattctttttcttttaaatttgttgctaatctctgataatgaagattcttactctgattctcagctgagctgtgagggcttccagggaaaatggaacaaaatggtgttcttaggtaatgggttgtagatactgagtcttcctttccttttctgacccttctcgaggacatttgctttcctcacacttttgtagtctctctttacatattactatatggaaatgaattgctctgtgctgaaatttgaagaccagataatgaaactgaaaagcaaacaatttttactgaatctgtctaccttcattcatgagaactccagaatgagtgttgaccactgaagcatcttttaagtctgtgttccattgtgccattcaggtttgctgtcacatatgcatcatctgaaatcatttgaaatttttgtacaataaaatatcctggatttgatcctgaaggaaactagtaagatcagatttttgggtcatgtctgttgtattttcagtaatgtgatttcagatggtcatctggattctcccacttctctactccattatttctctacttttccttccagcaaaccttgaaacgtgagggagatggattaatgtgagtaacaggaatgtgtctttaaaaagctagagtggttacatttaatcaggcagtaagataatttgggttcttgagttgttttggagtaatatcccacaactggggtaggaagctcaggacttttttctttaaagctagtcatttcaaaagcatattgtatttttttgaatgactacagtatggacaatttcaaaaaccaaaacccactttggattggtggaagtaaaaactggtaactcactcaagtgaatgaatggtcttgcattttaaaagcttatgggaaactcaatttgaaatgattagaaaatgtcaagtattataagctggtatttaagatgcttgtaaatactatttatgtttttaattttgtaaaataaagatttctttttaaaaaaaaaaaaaaaaaaaaaaa

SEQ ID NO: 326 - DNA, 4417 bp, Homo sapiens
  modified_base (129)..(129): a, c, g, t, unknown, or other
  modified_base (133)..(133): a, c, g, t, unknown, or other
  modified_base (135)..(143): a, c, g, t, unknown, or other
  modified_base (536)..(536): a, c, g, t, unknown, or other
  modified_base (766)..(766): a, c, g, t, unknown, or other
  modified_base (768)..(770): a, c, g, t, unknown, or other
  modified_base (772)..(772): a, c, g, t, unknown, or other
  modified_base (1806)..(1806): a, c, g, t, unknown, or other
  modified_base (2084)..(2084): a, c, g, t, unknown, or other
  modified_base (2350)..(2350): a, c, g, t, unknown, or other
  modified_base (2440)..(2440): a, c, g, t, unknown, or other
  modified_base (2451)..(2451): a, c, g, t, unknown, or other
  modified_base (3109)..(3122): a, c, g, t, unknown, or other
  modified_base (3214)..(3214): a, c, g, t, unknown, or other
  modified_base (3244)..(3244): a, c, g, t, unknown, or other
  modified_base (3296)..(3296): a, c, g, t, unknown, or other
  modified_base (3318)..(3319): a, c, g, t, unknown, or other
  modified_base (3331)..(3331): a, c, g, t, unknown, or other
  modified_base (3337)..(3337): a, c, g, t, unknown, or other
  modified_base (3357)..(3357): a, c, g, t, unknown, or other
  modified_base (3421)..(3421): a, c, g, t, unknown, or other
  modified_base (3542)..(3542): a, c, g, t, unknown, or other
  modified_base (3723)..(3723): a, c, g, t, unknown, or other
  modified_base (4150)..(4150): a, c, g, t, unknown, or other
  modified_base (4356)..(4357): a, c, g, t, unknown, or other
  modified_base (4359)..(4359): a, c, g, t, unknown, or other
  modified_base (4371)..(4378): a, c, g, t, unknown, or other
  modified_base (4382)..(4384): a, c, g, t, unknown, or other
  modified_base (4392)..(4392): a, c, g, t, unknown, or other
  modified_base (4394)..(4396): a, c, g, t, unknown, or other
  modified_base (4398)..(4406): a, c, g, t, unknown, or other
cccttgcctactgctcatgggtgtggagactgatattctggaagactgataggcagatttactattaacaaacacatagtctgtggcccagcaaagccaccccaatccctgcacaagggtaaaaggccngcantnnnnnnnnnagagcactgcagcagcaatgacggagggcacgtgtctgcggcgccgagggggcccctacaagaccgagcccgccaccgacctcggccgctggcgactcaactgcgagaggggccggcagacgtggacctacctgcaggacgagcgcgccggccgcgagcagaccggcctggaagcctacgccctggggctggacaccaagaattactttaaggacttgcccaaagcccacaccgcctttgagggggctctgaacgggatgacattttacgtggggctgcaggctgaggatgggcactggacgggtgattatggtggcccacttttcctcctgccaggcctcctgatcacttgccacgtggcacgcatccctctgccagccggatacagagaanagattgtgcggtacctgcggtcagtgcagctccctgacggtggctggggcctgcacattgaggataagtccaccgtgtttgggactgcgctcaactatgtgtctctcagaattctgggtgttgggcctgacgatcctgacctggtacgagcccggaacattcttcacaagaaaggtggtgctgtggccatcccctcctgggggaagttctggctggctgtcctgaatgtntnnngntgggaaggcctcaataccctgttcccagagatgtggctgtttcctgactgggcaccggcacacccctccacactctggtgccactgccggcaggtgtacctgcccatgagctactgctacgccgttcggctgagtgccgcggaagacccgctggtccagagcctccgccaggagctctatgtggaggacttcgccagcattgactggctggcgcagaggaacaacgtggcccccgacgagctgtacacgccccacagctggctgctccgcgtggtatatgcgctcctcaacctgtatgagcaccaccacagtgcccacctgcggcagcgggccgtgcagaagctgtatgaacacattgtggccgacgaccgattcaccaagagcatcagcatcggcccgatctcgaaaaccatcaacatgcttgtgcgctggtatgtggacgggcccgcctccactgccttccaggagcatgtctccagaatcccggactatctctggatgggccttgacggcatgaaaatgcagggcaccaacggctcacagatctgggacaccgcattcgccatccaggctctgcttgaggcgggcgggcaccacaggcccgagttttcgtcctgcctgcagaaggctcatgagttcctgaggctctcacaggtcccagataaccctcccgactaccagaagtactaccgccagatgcgcaagggtggcttctccttcagtacgctggactgcggctggatcgtttctgactgcacggctgaggccttgaaggctgtgctgctcctgcaggagaagtgtccccatgtcaccgagcacatccccagagaacggctctgcgatgctgtggctgtgctgctgaacatgagaaatccagatggagggttcgccacctatgagaccaagcgtggggggcacttgctggagctgctgaacccctcggaggtcttcggggacatcatgattgactacacctatgtggagtgcacctcagccgtgatgcaggcgcttaagtatttccacaagcgtttccnggagcacagggcagcggagatccgggagaccctcacgcagggcttagagttctgtcggcggcagcagagggccgatggctcctgggaaggctcctggggagtttgcttcacctacggcacctggtttggcctggaggccttcgcctgtatggggcagacctaccgagatgggactgcctgtgcagaggtctcccgggcctgtgacttcctgctgtcccggcagatggcagacggaggctggggggaggactttgagtcctgcgaggagcggcgttatntgcagagtgcccagtcccagatccataacacatgctgggccatgatggggctgatggccgttcggcatcctgacatcgaggcccaggagagaggagtccggtgtctacttgagaaacagctccccaatggcgactggccgcaggaaaacattgctggggtcttcaacaagtcctgtgccatctcctacacgagctacaggaacatcttccccatctgggccctcggccgcttctcccagctgtaccctgagagagcccttgctggncacccctgagaacatgcctacctgctgggtgccgtctgtgcgttccagtgaggccaaggggtcctggccgggttggggagccctcccatnaaccctgtctngggctccaacccctcaacctctatctcatagatgtgaatctgggggccaggctggaggcagggatggggacagggtgggtggcttagactcttgatttttactgtaggttcatttctgaaagtagcttgtcgggcttgggtgaggaagggggcacaggagccgtgacccctgaggaggcacagcgccttctgccacctctgggcacggcctcaaggtagtgaggctaggaggttttttctgaccaatagctgagttcttgggagaggagcagctgtgcctgtgtgattccttagtgtcgagtgggctctgggctggggtcggccctgggcaggcttctcctgcaccttttgtctgctgggctgagggacacgagggcaaccctgtgacaatggcaggtagtgtgcatccgtgaatagcccagtgcgggggttgctcatggagcatcctgaggccgtgcagcagggagccccatgcccctgggtcgtgagcttgcctgcgtatggggtggtgtcatggagcctcatgcccctgggtcgtgagctcgcctgagtatggggtggtgtcatggagccgcatacccctgggttgtgagctcgcctgcatatgcagggtctgtcatggaacatcccaagtctgtgcagcagggagccccatgcnnnnnnnnnnnnnnccctgggacatgaacccacctgcgtggaatgctgtttgtgaggtgtctacagggtttatagtagtcttgtggacacagaaatgcacaggggnacacttacggacacagaaatgcacaggggnaggccgagcataaccaggggtgaggggcaggcagcagttgtagttactgccngcggggcactgctatgtgcagnnggacagccagcncccagncccatcaccactccctgggnctggctggcaggtatggcaccctgggagcccggcatatacccagggcacccctacggctgccgncagtctcatgcccaggtgggtgctctgggctggagcgagggccaggttttgggccgaggcttccccaggcaatcctgtgagctcccttctagcctctgacccagtctggtctggcttgcantggatgtagggcttggggtgggaagttcaggtcctggctttgcctttgcctgatgtggatgagcagctcacatgctcagggccacctgagactgtcactgctctcccctggctactgggaggagtcactgagagcttcgttacccctgctgccttgcccagggcacaccctatacctcctnatctgctcttcccctccctgccgccttctgggcaggtagcagtccctggcctctccccctggctgatcactctccctcaggcagtggagatctgcgtctggacaccctcagatcctgtcattgcctgcccagagtccttcaggggcacccctctgccttggtgtgcggtccagggctctcacccaggtgccgcaccctctggggtcttctgtccagctcccttgccccatgtgctgtcactgactctccttgggactcgcctgcctgctcagagccctgcagggcttggtcagctgcctgttcagtgtcaacacttccctgcacatcttaaaactgggctttattttcgctgaaggaactgtgttgggacccttgacatctgtcaggtttgcacatgctgtttttttttctcagcccacgtgttctnccccacgtggggtagcagcaggacagacagtgaatcacagagtctgccctgagcagaggctgctgtccctgggactcctagccatggtcagactgtacaaaacggttttccagaaatgaaatgtaaatccatttttatactgaaaatgttactgaaagtcacttttatgagcatctgccttaataaacagacattgattcccttannanaaaaaaaaaaannnnnnnnaaannnaaaaaaanannnannnnnnnnntgatgtcgacc

SEQ ID NO: 327 - DNA, 3740 bp, Homo sapiens
cgctgggatggccgccacagctgtaggtgctgctagtgtttagcgctggtctttgccgggcgttgagggcagctcagcctccttgtttgtccggttcgcctgtgcgtggtactcaagggcaccagtattcccgcggtcggcagcatgggtcgggagtcacgccactatcgaaaacgatcggcatcccggggtcgctctggaagtcggtctagaagtcgctcaccctcagacaaaagaagtaaacgtggagatgacagacggtctagaagtagagatagagataggaggagagagaggtctcgtagcagggataaaagaagatctcggtcaagggacaggaagcgtctgagacgttccagaagtagagagagagacagaagccgagagcgaagaagatctcgaagtagagacaggagacgctcaaggagtagaagccggggccggcgatcccgatcctccagtcctggaaataaaagcaagaaaactgagaatagatctaggtccaaagagaaaactgatggtggggaaagttctaaagagaagaaaaaagacaaagatgacaaggaggatgaaaaagaaaaagatgctggcaactttgaccagaataagctggaagaagaaatgagaaagcgaaaagaaagagtagaaaaatggcgagaagagcaacgtaaaaaggctatggaaaacataggagaactgaaaaaggaaatcgaagagatgaaacaagggaaaaagtggagtttagaggacgatgatgatgacgaagatgatcctgcagaagctgaaaaggagggaaatgaaatggagggtgaggagttagatccattagatgcttacatggaagaagtgaaagaggaagtaaaaaaatttaacatgagaagtgtaaaaggtggtgggggaaatgaaaagaagtctgggccaacggtcacaaaagttgtcactgttgtgacaaccaaaaaagcagttgtggattctgataagaagaaaggtgagctgatggagaatgaccaggatgccatggagtattcttcagaggaggaagaagttgatcttcagacagcccttacagggtatcaaacaaaacagcgaaagcttctagaaccagttgatcatggaaaaattgagtatgagccatttaggaaaaacttctatgttgaagttccagaactagcaaaaatgtctcaagaagaggtaaatgtgtttcgattggaaatggagggcattacagttaaaggaaaaggttgccccaaaccaattaaatcctgggtccagtgtggaatttccatgaagatcttaaattccctcaagaagcatggctatgaaaagcccacgcccatccaaacccaagctattcctgctataatgtctggacgagatttgattggcattgccaaaacaggaagtggaaagaccattgcttttctgttgcccatgtttagacacatcatggatcagaggtcattagaggaaggagaggggccaatagctgtcatcatgactccaactcgagaactggctttacagattactaaagagtgtaagaagttttccaagactttgggacttagagtggtctgtgtttacggaggaacaggaatcagtgagcagattgctgagctgaaaagaggtgctgaaattattgtttgcacacctggtcgaatgattgacatgttagccgctaacagtggtcgggtcacaaatcttcgaagagtgacatatgttgttttagatgaagcagacagaatgtttgacatgggttttgaaccccaggtcatgcgcatcgtggataatgttcgtcctgatcgacagacggttatgttttcagctactttccccagagctatggaggctttggctcgcaggatcctcagtaaacctattgaagtacaagttggaggcaggagtgtggtttgctcagatgtggagcaacaagtgattgtgattgaagaagaaaagaaattcttgaagttacttgagcttctaggccattatcaagagtcaggatctgtcattatatttgtggataagcaggaacatgctgatggtcttcttaaggatttaatgagagcatcttatccttgcatgtctcttcatggaggcattgatcaatatgacagagatagcatcataaatgactttaagaatgggacctgcaaacttcttgtggctacctctgttgctgcccgaggtctagatgtgaaacatctgattcttgtagtaaattatagctgccccaaccattatgaggattatgtacacagagcagggcggactggaagagcaggaaacaagggttatgcttatacttttatcacagaggatcaagctcgctatgctggtgacataattaaagctcttgaattgtcagggactgcagtacctcctgatttagagaaactgtggagtgatttcaaagatcagcagaaagctgaggggaaaataattaaaaagagtagtgggttctctggtaagggattcaagtttgatgaaacagaacaagctttggctaatgagaggaagaagttacaaaaagcagctcttggtctacaagattcagatgatgaggatgctgcagttgatattgatgagcaaattgaaagcatgtttaattcaaagaagagagtaaaggatatggctgctcctggaacatcaagtgttcctgctccaactgcaggaaatgctgagaaattagaaattgctaagagattggctcttagaatcaatgcccagaagaatttgggcatcgagtctcaggtagatgtgatgcagcaggccaccaatgcaattcttaggggtggcaccattctggctcccactgtttctgcaaaaaccattgcagaacaacttgctgaaaagatcaatgccaagctcaattatgtgccgttagagaaacaagaagaagagagacaggatggtggacagaatgaatcttttaagagatatgaagaagaattagagatcaatgacttcccacagactgctaggtggaaagttacctctaaggaagctctgcagagaatcagtgaatactctgaagccgcaattacaatcagaggaacctacttccctcctggcaaagaacccaaggaaggcgagcggaagatttacttggcaattgaaagtgccaatgaactggctgtgcagaaagcaaaggcagaaatcaccaggctcataaaagaagagctgatccggctgcaaaattcataccaaccaacaaataaaggaagatacaaagtcttatagacatccggaaaaaagatttttacctgtgctggtctatgatgtatgtggcagttgctgtctgcagtttacaatgtattgtaaatgaagattttttaaattctatcttgctgattttttttaaatataagaaactggtacttggtaaagaaatctgtccgtaagtacccccacaatcagtcaaactatatttaaagccagcctgttttcagagtatgatgtcctttaatgtaaactcaaatatcaatattttaaatgtccggataatattctagaggtttaaaaaatggaaatatttgaactttctattgaagacaataaagtacacaagtcgttaaggggctattcactttatcctgtactttcaatgaaattgtgatcatttcctaagaaaaggtaaaattcactatcatattttgtgtccccaccttgatgttacatgactctggaacaatatgaactggatttaagaatgttataatagaagtcttacaaaatgg

SEQ ID NO: 328 - DNA, 5255 bp, Homo sapiens
cgaccccagccaccgccctgcggccagcgcgtcccccgactcgccgcccggagaccccgaggctccaacgagttcagaaatgtccagaaatgacaaagaaccgttttttgtgaagtttttaaagtcttcagacaattccaaatgtttttttaaagctctcgagtccataaaagaattccaatcagaagaatatcttcagattattacagaagaagaggcattgaagataaaggagaatgatagatcactttatatctgcgacccttttagtggcgttgtctttgatcacctcaaaaagcttggctgcagaattgttggtcctcaagtagtcatattttgtatgcaccaccagcgatgtgtcccaagagccgaacatccagtttataatatggttatgtctgatgtaaccatatcttgtacaagtctggaaaaagaaaaaagggaagaagttcataaatatgtacaaatgatgggcggacgagtatacagagaccttaatgtatcagtaactcaccttattgcaggagaagttggtagcaaaaaatatttagttgctgcaaacctgaagaaacctattttgcttccctcttggataaaaacactttgggagaagtcacaagagaaaaaaataactagatatactgatataaacatggaagatttcaagtgtcctatttttcttggttgcataatctgtgtgactggcttatgtggcttagacaggaaagaagttcagcaactcacagttaagcatggaggtcaatacatgggacaattgaaaatgaatgaatgtacacacctcattgtgcaagaaccaaaaggtcagaagtatgagtgtgccaagagatggaatgtacactgtgtgaccacacagtggttttttgacagtattgagaaaggtttttgtcaggatgaatccatatacaagacagaacctagaccagaagcaaagactatgcccaattcttcaactcctaccagccagatcaacacaattgatagtcgtactctttcagatgtcagcaatatttccaacataaatgcaagttgcgtaagtgaatcaatatgtaattcacttaacagcaaactggagcctacacttgaaaatctagaaaatctggatgtcagtgcatttcaagcacctgaagatttattagatggttgtcggatatatctttgcggttttagtggcagaaagctagataaactgagaagacttattaacagtggaggtggagttcgttttaaccagctaaatgaagatgtaactcatgttattgtgggagattatgatgatgaattgaagcagttttggaataaatcagcccacaggcctcatgtagtgggagcaaagtggttgctagagtgtttcagtaaaggttatatgctttctgaagaaccatatatccatgctaattaccagccagtggaaattccagtttcacatcagcctgaaagtaaagcagctcttttaaaaaagaagaacagcagcttctctaagaaagactttgctcctagtgaaaagcatgagcaagctgatgaagatctgctctctcaatatgaaaatggtagctccacagtagttgaggctaagacgtctgaagccaggccctttaatgattctactcatgctgagcccttgaatgattctactcacatttctttgcaagaagaaaaccagtcttctgtcagtcattgtgtccctgatgtttctacaattactgaagaaggcttatttagccaaaagagtttccttgttttgggttttagtaatgaaaatgaatctaacatcgcaaacatcataaaagaaaatgctgggaaaatcatgtcccttctgagcagaactgttgcggattatgctgtggttcctctgctggggtgtgaagtggaagccactgtgggagaagttgttacaaatacatggctggttacttgcatagactatcagactttgtttgatccaaagtcgaatcctctcttcacaccagttccagtaatgacaggaatgactcctttagaggattgtgttatttcatttagccagtgtgctggagcagaaaaagagtctttaacattcctagcaaacctccttggagcaagtgttcaagaatactttgttcgcaaatccaatgcaaagaaaggcatgtttgccagtactcatcttatactgaaagaacgtggtggctctaaatatgaagctgcaaagaagtggaatttacctgccgttactatagcttggctgttggagactgctagaacgggaaagagagcagacgaaagccattttctgattgaaaattcaactaaagaagaacgaagtttggaaacagaaataacaaatggaatcaatctaaattcagatactgcagagcatcctggcacacgcctgcaaactcacagaaaaaccgtcgttacacctttagatatgaaccgctttcagagtaaagctttccgtgctgtggtctcacaacatgccagacaggtcgcagcctccccagcagtaggacaaccacttcagaaggagccctcgttacacctggatacaccatcaaaattcctgtccaaggacaaactcttcaagccttcctttgatgtgaaggatgcacttgcagccttggaaactccaggacgtcccagccaacagaaaaggaaaccgagtacgccactctcagaagttattgtcaaaaacttgcaacttgctttggcaaatagctctcgaaatgctgtcgctctttctgccagccctcaactgaaagaggcccagtcagagaaggaagaagccccaaagccacttcacaaagtagtggtatgtgttagtaaaaaactcagtaagaagcagagtgaactaaatgggatcgcagcctctctaggagcagattacaggtggagttttgatgaaacagtgactcatttcatctatcaagggcggccaaatgacactaatcgggagtataaatctgtaaaagaaagaggagtacacattgtttccgagcactggcttttagattgtgcccaagagtgtaaacatcttcctgaatctctttatccacatacttataatcccaaaatgagcttggatatcagcgcagtgcaagatggccggctctgtaatagtcgactactctcagctgtgtcttcaacaaaggatgatgagccagatcctttgattttagaagaaaatgatgtagacaatatggccaccaataataaagagtcagcaccatcaaatggaagtggaaagaatgactctaaaggagttctgacacagaccttagagatgagagagaactttcagaagcagttacaggagataatgtctgcaacatcaatagtgaaaccccaagggcagaggacttccctttcaagaagtggttgtaacagcgcatcttcaacccctgacagcactcgctctgctcgcagtggacgaagtagagtcctagaggcactgaggcagtctcgtcagacagtacctgatgtcaacacagagccttcccaaaatgaacagatcatttgggatgaccctacagcaagggaggagagagcaaggcttgccagcaatttgcagtggcctagttgtcccacacaatactctgagcttcaggttgacattcaaaacttggaggattctccttttcaaaagcctttacatgattcagaaattgctaaacaggctgtctgtgatcctggaaacatacgtgtgactgaagctcccaaacacccaatctctgaagaactggaaactcccataaaagacagccacctgatccctacgcctcaagcccccagtattgcctttccactcgccaacccccctgtggctccgcaccctagagaaaagattataacgatagaggagactcatgaagaattaaaaaaacagtacatatttcagttatcatctctgaatcctcaagaacgtattgactattgtcatctgattgagaaactaggtggattggtgatagaaaagcagtgctttgatcccacctgtacacacattgttgtgggacatccacttcgaaacgagaagtatttagcctcagtggcagctgggaagtgggtgcttcatcgctcctaccttgaagcctgcaggactgctggacacttcgtgcaggaagaagactatgaatggggaagtagttccatacttgatgttttgactggaatcaatgtacagcaacgaagactagcacttgcagcaatgagatggagaaaaaaaatccagcaaagacaagaatctggcattgttgagggagcatttagtgggtggaaggttattttacatgtggatcagtctcgagaagcaggcttcaaacgccttcttcagtcaggaggagcaaaggtgctacctggtcattctgtacctttatttaaagaggccacacatcttttttctgacttgaataaactgaaaccagatgactcgggagttaatatagcagaagctgctgcccagaacgtgtactgcttgagaacagaatacattgctgattatctcatgcaggaatcacctcctcatgtagaaaattactgtctaccagaagctatttcatttattcagaataataaggaacttgggactggattatcacaaaagaggaaagctcctacagaaaaaaataaaatcaaacgacctagagtacactaatcgcatctaccctttagttaccaaacattaaatgtttttaaaaattgaaagcctgaatgtgactgtgatagatttgggtagtaatttaaagatgagtacctgaagaattctgcttcagagtataatgatgacccttcttgagttttgaacacctgaaattgtaatcactgaaatattaactgtttcttaataaaaagttacctgaaataacaacaaaatacaactcctcagctagcttgctgttaaaccacattgaagtctgttaaaagatatttatttttcttgtaaatatctgaagctgtagcttagtggaaattttagcaaggtaatggattttgctttaaaatgtctgccttacaaattcataacaacaagatttgtcagtcagcatttattcatgttttccctgatttttatcttctcaccattttacctcttttaacaggagcctgagcacaaggtttaatgaggaagctggggctataaatatgtgtgtatatatgtatatgtatgtttgtacaaatctccatgatgtttgccaagtttgaatgcgcaaaacttggaaaatgtgacaataaagaataaaagtagtaactcaaattagtat

SEQ ID NO: 329 - DNA, 736 bp, Homo sapiens
cgagctggagaggtggtcggagaagtaggaacctcctgccgggctcgtggcggcttctgtccgctccgcggagggaagcgccttccccacaggacatcaatgcaagcttgaataagaaaaacaaattcttcctcctaagccatggcatatcagttatacagaaatactactttgggaaacagtcttcaggagagcctagatgagctcatacagtctcaacagatcaccccccaacttgcccttcaagttctacttcagtttgataaggctataaatgcagcactggctcagagggtcaggaacagagtcaatttcaggggctctctaaatacgtacagattctgcgataatgtgtggacttttgtactgaatgatgttgaattcagagaggtgacagaacttattaaagtggataaagtgaaaattgtagcctgtgatggtaaaaatactggctccaatactacagaatgaatagaaaaaatatgacttttttacaccatcttctgttattcattgcttttgaagagaagcatagaagagactttttatttattctagaattgcagaaatgactacactgtgctataccagagaattccagtagaaagaaacttgtaactctgtagcctcttacatcacctttattatacagcatgaaaaaccataacttttttttaaggacaaaagttgttgccttcctaagaaccttctttaataaactcattttaaaactctg

SEQ ID NO: 330 - DNA, 2162 bp, Homo sapiens
  modified_base (909)..(909): a, c, g, t, unknown, or other
  modified_base (1400)..(1400): a, c, g, t, unknown, or other
  modified_base (2051)..(2053): a, c, g, t, unknown, or other
  modified_base (2056)..(2056): a, c, g, t, unknown, or other
  modified_base (2072)..(2074): a, c, g, t, unknown, or other
ttttttttttttttttttttttttttttttttttttttttttttttttttttttttttttttttttttttttttttttttttttttttttttttttttttttttttttttttttttttttttttttttttttgtgtttcaacaaactttatttatgaacactaaatattcatgttaattttcaagtatcataaaagtctttaaaaaaaaacatttaaaattataaacacaattcctagctcacaggccataaaaagcaggcagcaggctggatttgatccacaggccatagttggctgtctcttaaacaggcttttatacgttatgcaaagtgtttcaaattccagagactttggagacttttcgttttttagatttctcattttaaaacacacataatacaagttttctttctggatcaatatactcacgagagaaaataattcagaaaaaaataaaattccttacttaaaaaaagggaaaagctatagaacaaatgtttcgtcttaaaatatatttaggaaatgtaaaattaaagattaaaaattttattctatgcaacataaaataatatgcataaatctggcacataatttctttgtttttactttagaaaaaagacagtaagaaaaaagtttataaatttctcagtcccttttatacaaagttgcaactaaaaccagcaatcacttatatgtacaaccatcaactctgaatacaatgtgaattatacctaggaactgtaatttacctagatgagttctgcctgctttatgaaaaacacacacttatatcacagaacaccgtggcttctacaatttgtaacaattttgaaaacgaaactcctgcctccataatataaggaaacaagagtactctttccatagtcatcatcctgtataaaaaaaanttcatagtctgatttacctttgtcaaaggtaaaatgattcacatttgcttggattactctgatcctcagtagttcctaaacacaaaataaagtttgcatgaacctttatctgggttttccaaagcaagtattatgctggcagaagtccatgagctgaataaaaagatactaaatataaaaggtttaccaactttatcctttcttaattttacgatagcttcaggtattgagacctaactggtttcctgtgcctatccattgtgaacacatctcaatcttctacttttaacactcctcagcaccatattttcgttgtttctttattgtgcgacgtagaagatcctttcgtccaacttcaatcatttgttcttcccaagacttcatttcattatgataacgagtttcgtcctctttagcatgctgaatatataattccttttcagagtcagacagatttttccagttttcctttacagtcttcagcttttccntgcggtgaatcacccttagcttcttggaatctttcagctacataaacgttataagctgaacgaggtctttttggttttccaagcagtgttaactcttttttttttgtcatagctttcctttttaaatgtttgtccatgatttctttttccaaagacataatctgacttggagttagctgttctttaaatctgcttatctcttctttatatacctgccactccgccctataagcatcttgatatatttttttctttgaatcaggaagttccctccaacgctgggcaattcttctaattagttctgtagtttttgcatctgggttctgagctttaaatatgggtagttgttctttagaaaatcgaaggtaagaacttacaggtttctttggacaacttgccaagacagatgaaaaccacctcggtaaatacacaaaactgaagggggagcgcagtcgacttccacagccggtgcacagctctgctccagaccttcccagggcactcagcacgccccacatgcttcggagaaacgccatcgctccggtggatgaggcagtgacccgaccccaatctcggagagcctcctggcaatacacaactccagcaatcacaactggaacccgcgtgcgaccctccggcgtgtgttatcannnccnccactagcgaggcacnnngggaaatctgctaacatccggtcggtagatggggacggggcggggcggaattgcgcaggcgcgggagagcgtaccccggtgggcggcc

SEQ ID NO: 331 - DNA, 2672 bp, Homo sapiens
  modified_base (14)..(21): a, c, g, t, unknown, or other
  modified_base (409)..(409): a, c, g, t, unknown, or other
  modified_base (437)..(437): a, c, g, t, unknown, or other
  modified_base (457)..(457): a, c, g, t, unknown, or other
  modified_base (513)..(513): a, c, g, t, unknown, or other
  modified_base (524)..(524): a, c, g, t, unknown, or other
  modified_base (2659)..(2660): a, c, g, t, unknown, or other
  modified_base (2668)..(2670): a, c, g, t, unknown, or other
tttttttttttttnnnnnnnngcaatttacaggctcaatatatttttttacactttgcttgaaagaaaatttcaatattttacagtctttcagtaggcattatatacactgcactttatgaaatctaaaaggtattgaaataaatttttccaacattttggtaacaaaacaaacaacgtttctccaaatacttgtgctatctacatgatgtttgctctgataatcactaatcaaaacaaacaacgtttctccaaatacttgtgctatctacatgatgtttgctctgataatcactaatcacaaaaaactgactcaatggaataattagaaaaattgtctaacaccatgcatgggtttcaatcatttttaatatcctatcctagaaacattctacaaatcttaagatttnaaaaattaagtctctgttctgatttttnaaagatacctttttatgacnatatccataacattgacaggtacatgttaaggctagtatcatccccttttttgaanttttttgactntttttttttttttttaagaaagatagtaaaagccagactccctttagggctttgaactgtacctacagaaaatcagagtgcagtgaacataatgttcagtcctacagtcaggatgcagttgctccttcccattccacaagatactgcacctttccatcaagtgtcacccgacgtgccaaaactcggtatttttcgccacatgctattctacctgcagcaccaaaataactggtaatggagttctttagatgattgagttgtaactcctgatctgctaagttattcagaatctctgtgttgagttcatcaaactgataatcttctttgccttcatcatcttttacaatttctgagttctgagtctggagtgctcttcttggaagacgacctcttcttctccgcaaatgtggtattgcagcaggccaagatcttcctgtacgcgttctttttctggagtcagataatccataatgcctggaaatgctagacgaggtagtttcttttgcactggaagcacccgtgaaatccacatctgaggtattggatgaatgtgcagttccctcagttctccctatagaacaaggtaaatccaaagtaggattctctgaaattgattccttatccaaaagtggctcagcagttttttgaatcatttttcttgtatatgggccaggtggacgacctacagattttttctttccttttttttctatgccattgcttacttcccttgaatcagatataggtttggatgcctttctgcctttaattttaaattcatgagatgttccttcaggttctttctctgctttgaaagccacatttggtggcacaggaggaacacgaattcgcaacccaaacaaatgcttcttcttctttatttctttcccagacataaacatggtcttgtaatcatttaatgcctccagaacatgctcatatctttcagattttggtgtgtctgccagctctccagggtgcaatctatcccagttttcattaatgtatgtcataagctcaagttcagaatcaaagtatttcttcttatgaataacacttaggttgtaaaggcataggtgtgctatatctacccactgtaatggtagacgtttgaggtattctggtccagaactgcagacagagcatataaacgtataaaatctgtctccaaatagcattggcttttgaaggcattgcacacaagcctcatgaaaccactgcttacatttgcagcactgtagcatcttcaaataccagtctccagggcctccacaatagcagtaacactgctggacattggttttatgacctgcatcccattcaaggtctgccacactatagggtaatgtctgcttcatgacttgcaatgctttggcatttggtcctttcttaagtgcaccacccctctttgttgttgttgcaaaaacacactgccgacagagccatttttcatctgaatcaatcacactggaatcaatatgaggtgtgtgacacaactgatgatatccttggccacacttgtcacatataaccatttcattgggagcttctgaatactcttcttgacatattgtacagaccatttccccacttccagtggctcctgcctgtttgaatgtccttccagagaacccaggatttagaactgtcttcaaatatgatgaagcagctctgtttcaatatgtttatctttttgatagtgccaagataaaacaagccatctgaccatctagctaggacatcctgaccctcttcaaatttacatgctggctttttggctttatgtccatcctgtaaagacagcttggtcaaggatgttggggtcttttggtttcgacgtaaaggagaccgcttgtggaccagtgaattacctgcccctgtagagtctctcattcggtcacttcagtggtgccaaccgcttcatacaggaaaaaacaaccaatccgtccccgtgggcgcttcccctgcgagtccgagcacttactgggcacccgccccaccgggtacccggcacatatgcacgcacaaaccgaggtccttggagacaagggttgggggtagaatgagcgttcttacaccggcctcaaacacagcccacttcaatacagcccctcgccattttggtttcccgcggnntgccgtcnnngc

SEQ ID NO: 332 - DNA, 647 bp, Homo sapiens
gggcgccgccatcgccgtcatgctgggcgccgctctccgccgctgcgctgtggccgcaaccacccgggccgaccctcgaggcctcctgcactccgcccggacccccggccccgccgtggctatccagtcagttcgctgctattcccatgggtcacaggagacagatgaggagtttgatgctcgctgggtaacatacttcaacaagccagatatagatgcctgggaattgcgtaaagggataaacacacttgttacctatgatatggttccagagcccaaaatcattgatgctgctttgcgggcatgcagacggttaaatgattttgctagtctagttcgaatcctagaggttgttaaggacaaagcaggacctcataaggaaatctacccctatgtcatccaggaacttagaccaactttaaatgaactgggaatctccactccggaggaactgggccttgacaaagtgtaaaccgcatggatgggcttccccaaggatttattgacattgctacttgagtgtgaacagttacctggaaatactgatgataacatattaccttattttgaacaagtttccctttattgagtaccaagccatgtaatggtaacttggactttaataaaagggaaatgagtttgaactg

SEQ ID NO: 333 - DNA, 622 bp, Homo sapiens
ggcacgagctcgtgccggccttcagttgtttcgggacgcgccgagcttcgccgctcttccagcggctccgctgccagagctagcccgagcccggttctggggcgaaaatgcctgcccttcacatcgaagatttgccagagaaggaaaaactgaaaatggaagttgagcagcttcgcaaagaagtgaagttgcagagacaacaagtgtctaaatgttctgaagaaataaagaactatattgaagaacgttctggagaggatcctctagtaaagggaattccagaagacaagaacccctttaaagaaaaaggcagctgtgttatttcataaataacttgggagaaactgcatcctaagtggaagaactagtttgttttagttttcccagataaaaccaacatgctttttaaggaaggaagaatgaaattaaaaggagactttcttaagcaccatatagatagggttatgtataaaagcatatgtgctactcatctttgctcactatgcagtcttttttaagagagcagagagtatcagatgtacaattatggaaataagaacattacttgagcatgacacttctttcagtatattgcttgatgcttcaaataaagttttgtctt

SEQ ID NO: 334 - DNA, 2707 bp, Homo sapiens
ggcaggccgagccagccgtgcgccgcgctccagggcccagggcgccgcacacgcacccacccacccacccagcctcgcagcgccatgggcaagaacaagcagccacgcggccagcagaggcaggggggcccgccggccgcggacgccgctgggcccgacgacatggagccgaagaagggcacgggggcccccaaggagtgcggggaggaggagccccggacctgctgcggctgccggttcccgctgctgctcgccctgctgcagctggccctgggcatcgccgtgaccgtggtgggcttcctcatggcgagcatcagctcctccctgctagtcagggacactccattttgggctgggatcattgtctgcttagtggcctatcttggcttgtttatgctttgtgtctcatatcaggttgacgaacggacatgtattcaattttctatgaaactgttatactttctgctgagtgccctgggcctgacggtctgtgtgctggccgtggcctttgccgcccaccactattcgcagctcacacagtttacctgtgagaccacactcgactcttgccagtgcaaactgccctcctcggagccgctcagcaggacctttgtttaccgggatgtgacggactgtaccagcgtcactggcactttcaaactgttcttactcatccagatgattcttaatttggtctgcggccttgtgtgcttgttggcctgctttgtgatgtggaaacataggtaccaggtcttctatgtgggtgtcaggatatgctccctcacggcttccgaaggcccccagcaaaagatctaacattcttgctcaaagttgcgagagaaagtagcacatggagtagctgaggttaaacaaacaaaaaaaaattttaaacaaagaaaggaaaaaaattgacaataaaagtcactcttctaattgaatatttttatatttttatgaaacaaaagagcatttcttcaggtttctattgtattttttttaacattcttgcagagaaagcaagatccaaattgattttgggatattaaaagttaacagaacactgaacaaggaaagaatggcatagatctatctttacagtctggagttaattcctgttaactcattttatccattccttacataatcttctttcctgttagtccagtttgatggtgtgaatggtgaatttcaggcccagttgctaaattttgtggcatcttcctctagtccttcccacctccagtcatcagccccactctgtcttggagacaggcaggaggtgggggaagagctgaatctctttattttccctggtagagacatcttcaaggcatgaaatagcttaaagagcagagtagaaatggaagaggctttgcaaaaggctagataactaacaacacctgggttggggcggcggcctcttctcttcagctcccttagcttggctccgtaagtggatcacttgccaaatgctttagatgattgcctctcaataattgaaaggtggtggtagttgtattctaaatgatgtagaaggtttaaaaataattacattatgcttctattctatcatctaaaacaaatcattaaaactaatttctagctaattgttaattataattatgctcagaagtctatttaatgagctctgactgtacttacgctgcactgtcggtgttaagagaaattactctcacaagagcagaggcctgaagattctttcttctgaaagccaagcaccacaaggaaaaaaaaattattaatagctcaggttaaaaacacccatttaaacaaaaacaagagcatttgtaataggaagtgtttatacaaacagcacatttgtgatatgttgaaaagcatctctcttggcaaccaatctatgtttgaggaagattgggtaatgctgatgtgttccattcatgaaactgtatttgatacataatcctattattaattcgtatgcttagtcaacctaggaaatcaaaataatgttttgaagttcttatttgagcaatatggccttgacttggagggtagttttagttgttttgtttttaagtgactgtggtttaaagcacaaatgccccaaggtggggagacttctctctgtgattattgttgctattaaattctgaactgtatccatattttaaggaaggagctaaaaatggaaattcatgaaacataaatggtatcaagaactttatcagtatgctttgttgaaagcagaaattaagataataattgagttcaattcgcctctccgcattgcctattgatacactttactaatcatgaaattctaacctaaaaggaaaacattttcctgcttgtcttagaagaaagtggaataattccactgattgtgataatggtttcaatttctacacaatataaatatccagtataaaggaaagcgttaagtcggtaagctagaggattgtaaatatcttttatgtcctctagataaaacacccgattaacagatgttaaaccttttaatgttttgatttgctttaaaaatggccttcctacacattagctccagctaaaaagacacattggagagcttagaggataagtctctggagcagaatttatcacacacaaaagttacaccaacagaataccaagcagaatgatgaggacctgtaaaataccttgtgccctattaaaaaaaaaaaaaaaaaaaaaaaaaaaaaaaaaa

SEQ ID NO: 335 - DNA, 917 bp, Homo sapiens
aggaggcagtagttccccgcttcccttccgcgggagggagagttagctagccatccaagaaaacaccatgaaagataacgatatcaagagactactgtatacccatcttttatgcatattttcaattatcctaagtgtcttcattccatcactcttcttggagaacttctcaatattggaaacacacttgacatggttgtgcatctgttctggttttgtaactgctgtcaatctagtactatatttagtagtgaaaccaaatacatcctctaaaagaagttcattatcacacaaggtaactggatttttgaaatgctgtatctactttcttatgtcttgtttctcctttcatgtaatttttgttctgtatggagcaccactgatagagttggcattggaaacatttttatttgcagttattttgtctacttttactactgtgccttgcttatgtttgttaggaccaaacctcaaagcatggctaagagtgttcagtagaaatggagttacatccatatgggagaatagtctccagatcactacaatttctagctttgtaggagcatggcttggagcacttcctattccactggattgggaaagaccatggcaggtatggcccatctcctgtacgcttggagcgacctttggctacgtggctggccttgttatttcaccactctggatatactggaatagaaagcaacttacatacaagaacaattaactggagcaaagggagatatttctttgtgcagattctgtaagggctgggcagaaatgtgtatggtcaaagccaagcagttccatttacagctctgttttttacgtagttacaacatgatgtgattgtagctttttaaactatgaaacccctgagagattgtaccttctagttgaaataaagtatttataat

SEQ ID NO: 336 - DNA, 7639 bp, Homo sapiens
  modified_base (3159)..(3159): a, c, g, t, unknown, or other
  modified_base (3439)..(3439): a, c, g, t, unknown, or other
  modified_base (3933)..(3934): a, c, g, t, unknown, or other
  modified_base (4633)..(4633): a, c, g, t, unknown, or other
  modified_base (4946)..(4946): a, c, g, t, unknown, or other
  modified_base (5191)..(5191): a, c, g, t, unknown, or other
  modified_base (5265)..(5265): a, c, g, t, unknown, or other
gggccttgcgccgcgggagcggacggcggcggaggagaccctaggctcgcggcccgaggcgggagggctcggcttctcgactgcccgcctccgaggccgccggccgcttctctctcccagagtggccgccgcccctggagactcgccgtgacacgggcctaagccgccgccgcgggagtcctgaccgctcggacccgtcggatcaggccgggtgggagcgagcttgcgggcaggtgccgctcccggagggtgggccggaggcgaggcgcccaccgcgcggctcgcgggccgggctcggcggaggggccgctcgcgcagcacccccaccgcgggccggagcccgggtcgccgccccgccttctcccgggaccgcccggccggagctgcgggggccgagggacgccgcgcccgccgccgccagccgggctcgcgcgggagagcagggaagagaaactttgccttttattgtttttagtccttaagtgcaaggaactctgtgttgggaggaaaaatgtccttcttcagtttccgtaagatcttcaagttggggagcgagaagaagaagaagcagtacgaacacgtgaagagggacctgaaccccgaagacttttgggagattataggagaactgggcgacggagcctttgggaaagtgtacaaggcccagaataaagagaccagtgttttagctgctgcaaaagtgattgacactaaatctgaagaagaacttgaagattacatggtagagattgacatattagcatcttgtgatcacccaaatatagtcaagcttctagatgccttctattatgagaacaatctttggatcctcattgaattttgtgcaggtggagcagtagatgctgtgatgcttgaacttgagagaccattaactgagtcccaaatacaagtagtttgcaagcagactttagatgcattgaactacttacatgataataagatcatccacagagatctgaaggctggcaacattctctttaccttagatggagatatcaaattggcggattttggagtatcagctaaaaacacgaggacaattcaaagaagagattcctttattggtacaccatattggatggctcctgaagtagtcatgtgtgaaacatctaaggacagaccctatgactacaaagctgatgtttggtccctgggtatcactttaatagaaatggctgagatagaaccacctcatcatgaattaaatccaatgcgagtgctgctaaaaatagcaaaatctgagccacctacattagcacagccatccagatggtcttcaaattttaaggactttctaaagaaatgcttagaaaagaatgtggatgccaggtggactacatctcagctgctgcagcatccctttgttactgttgattccaacaaacccatccgagaattgattgcagaggcgaaggctgaagtaacagaagaagttgaagatggcaaagaggaagatgaagaggaggaaacagaaaattctctgccaatacctgcaagtaagcgtgcatcttctgaccttagtatcgccagctctgaagaagataaactttcacaaaatgcttgtattttggagtctgtctcagaaaaaacagaacgtagtaactctgaagataaactcaacagcaaaattcttaatgaaaaacccaccactgatgaacctgaaaaggctgtggaggatattaatgaacatattaccgatgctcagttagaagcaatgactgaactccatgacagaacagcagtaatcaaggagaatgaaagagagaagaggcccaagcttgaaaatctgcctgacacagaagaccaagaaactgtggacattaattcagtcagtgaaggaaaagagaataatataatgataaccttagaaacaaatattgaacataatctaaaatctgaggaagaaaaggatcaggaaaagcaacagatgtttgaaaataagcttataaaatctgaagaaattaaagatactattttgcaaacagtagatttagtttctcaagagactggagaaaaagaggcaaatattcaggcagttgatagtgaagttgggcttacaaaggaagacacccaagagaaattgggggaagacgacaaaactcaaaaagatgtgatcagcaatacaagtgatgtgataggaacatgtgaggcagcagatgtggctcagaaagtggatgaagacagtgctgaggatacgcagagtaatgatgggaaagaagtggtcgaagtaggccagaaattaattaataagcccatggtgggtcctgaggctggtggtactaaggaagttcctattaaagaaatagttgaaatgaatgaaatagaagaaggtaaaaataaggaacaagcaataaacagttcagagaacataatggacatcaatgaggaaccaggaacaactgaaggtgaagaaatcactgagtcaagtagcactgaagaaatggaggtcagaagtgtggtggctgatactgaccaaaaggctttaggaagtgaagttcaggatgcttctaaagtcactactcagatagataaagagaaaaaagaaattccagtgtcaattaaaaaagagcctgaagttactgtagtttcacagcccactgaacctcagcctgttctaatacccagtattaatatcaactctgacagtggagaaaataaagaagaaataggttctttatcaaaaactgaaactattctgccaccagaatctgagaatccaaaggaaaatgataatgattcaggcactggttccactgctgatactagcagtattgacttgaatttatccatctctagctttctaagtaaaactaaagacagtggatcgatatctttacaagaaacaagaagacaaaagaaaacattgaagaaaacacgcaaatttattgttgatggtgtagaagtgagtgtaacaacatcaaagatagttacagatagtgattccaaaactgaagaattgcggtttcttagacgtcaggaacttcgggaattaagatttcttcagaaagaagagcaaagagcccaacaacagctcaatagcaaactacagcaacaacgagaacaaattttccggcgctttgagcaggaaatgatgagtaaaaagcgacaatatgaccaggaaattgagaatctagaaanacagcagaaacagactatcgaacgcctggaacaagagcacacaaatcgcttgcgagatgaagccaaacgcatcaaaggagaacaagagaaagagttgtccaaatttcagaatatgctgaagaaccgaaagaaggaggaacaagagtttgttcagaaacaacagcaagaattagatggctctctgaaaaagatcatccagcagcagaaggcagagttagctaatattgagagagagtgcctgaataacaagcaacagctcatgagagctcgagaagctgcnatttgggagctcgaagaacgacacttacaagaaaaacaccagctgctcaaacagcagcttaaagatcagtatttcatgcaaagacatcagctacttaagcgccacgagaaggaaacagagcaaatgcagcgttacaatcaaagacttattgaggaattgaaaaacagacagactcaagaaagagcaagactgcccaagattcagcgcagtgaagccaagactcgaatggccatgtttaagaagagtttgagaattaactcaacagccacaccagatcaggaccgtgataaaattaaacagtttgctgcacaagaagaaaagaggcagaaaaatgagagaatggctcagcatcagaaacatgagaatcaaatgcgagatcttcagttgcagtgtgaagccaatgtccgcgaactgcatcagctgcagaatgaaaaatgccacttgttggttgagcatgagactcagaaactgaaggagttagatgaggaacatanncaagaattaaaggagtggagagagaaattgagacctaggaaaaagacactggaagaagagtttgccaggaaactacaggaacaggaagtattctttaaaatgactggggagtctgaatgccttaacccatcaacacagagccggatttccaaattttatcctattcccagcttgcattccaccggatcataacaaagggaagcattctgtgcgtgggtttggctctttcagtatgtcattctgttctcatcttctgccacagtctctcagatagctcatgaagacaatcacctgcctcaccttctaggtgttttccttttttgttttttttgttttgttttgtttttaagcaaagatgaagggaaaacgaactaagacagacgctaggccatgttggcaaagtagcatcttggtgactaaggtgactttgtatattcatcttaaaaattatgttctttagacactgctacctgaaaactgttggagaaataatgtttaaagttatttaagaaaaactgttacatcactaagtattaataaattcttcttacctgacgtaacttctcaatgcctaaattctgtagttgaagctctgctgcagagagttgggataattttcttttggtggatcagctctcataaaaaagctatgatttgctcaaatatgctgttgactcagtaaatgaatatatttttttntttaaataggaacaacctcttttaaaagagaaaaattatttcagtgatttgtcaaaacgaattacctcttttggcatgagctaataattgagggtgctaattttcttaagatagtgcctaaaacactaaatttcagtcaagtcgtaagtaggattttctttttgatcaacagggacaaaaacatctttagaattaaaaacatggttgttttggaatttttgcttctcttaccgtttgatagaaattttcatcctaaaatacatgtacaaagtttggaaagatgaaaaaaagaggtagcttttagattgcaaantggaaatgtaaaactcatgaaatttaagcaatataggtttagctatctgtgtttattttctaaaataatacctgagctggttaaatgatttctctccatcttagctaattctgtttaaaactctgtcagaggcctgcaggctgtgagttatatttataaatatatcttcagaaattaatcttaaaagaggcattagttcagaatacttttttaaaagtttaaattaaatatttaggcacgtcagnaattacttttccttattttgaaatgaggctacttatgtcttggttttattttgttccatgtttaaatcattcantttgatttgagtgggaaaagcctgaagcctttatcatgtggttgctggtgtgtgtaattattaatgaaatgttcactcctagtcccttatgaggcttagaatttcaaccacgtgtcaggtcagacagtattataaactgtactttgctgtctgagacagcacatttgtgaatgatgcttgctgcctgccattttcaacctattctctcttaagagtgctaggtaccaaattgtgaaagtttgttttcagttatattacttttgaggctggtgaaaaatttaaatgtaactttgtgggaacactgattcatatttagaaaatgtaaatgtctgtagcactttcttgcagttaatttgaaaactttggatgctgaaccttgtttgtcagtgatttagatgatttaaaaatgcatgtgtgatttgaattttataattgttttgacaagcataatttacttggacaacttcgtaggtagccttaacttctggccaagtttgttttttatataaatatatatacatatatacatattatgtatggttgtaaattcatacacttatcacatgaatgtgttactgtatacaaaactcttaatgctttattctcaaatgctgggttgaaaaatgttttgaaagccttttaaaatatatatctttataaagtaatattcaggatgatgataaaaattgtttatattgttatgataaaaatgacagtataatgttgcccagtgtatttaatgatttatttgaagagggattgggaaggaacgtcttcataccactttctcctttgaaattttcagtttattgacttttaaaaaatgaatacctcaggcagtagacattttttttctagtatcatttaattgataccctgtgcgctaaatagtgtgtggtgcctgattaatttggtctgaatatttgattctttctgttcctttcaacttgacattcagattattgactcaaggagagaggctcagagtggaatggttggcgctgtgggtaaggttggatctcccttaaaactgccttttggattcagtgtttgtgcttgagttcgctttcaaatatgaccataatcgtgtgggtgcaagactgtacagtgatacatatgtagaggtaaagcattcattttaatacttaaagttatataaatcttttcaaaaagtgttttgttataaaatacgctgtttgtacccataccagcccacctcttctgaggccctgtattcaaatagatgatagtgatctatctttcctgcatgaagtgtaggtggcgagtgggcgaggggcgcagacttctttgaaatcgaagggtacagtcaaatctactgctgatttggttgttttgttgctgtggcagaatatgccatgaaacacatacagacttctccgaacgtgcaccctcatcagccacctcctcccctctttccctgagtgctgtgaacacagcagacctgcacacttctgcagatccagctcctacagcttggggcactaggctgcctttcctagtcctgtcaacaaccatacagtgcgaattgctgaattagctgctattctatgtggagtcacattaagctttttcttatctttttctatggggaagctatagggtgggtaaggaaaaaatgttgaatgcttttactttgctgaaaatattagaactctcttgtgacaggatacagcaaattataattaaatataaattaccagaaccagagctacctctaagtcatacttcctcaagcacaaagctctcaggcatatgagacccaccttaatgaagggtctctgatttcttgagcatcagcgagtttcagaagtgactatttttttgtactcttctagtttccttgtaactatacactttttcccattccacactgtgcttaaatgacaaagactcttctgagaagccaaattctgtccaagtattaactagagatattgttgattaaagaaaatctagaactgaagtgaaagaagagagttccagttctaatagtcttttgattaacaattcttttctgagaaatgatttttataagaaatggggtgattctttaaatgcttttcttaagttgaaggcacaacagttaatggctgtattgttgctattccgttgctgacatgtttttgataaagctttaacattcctgctactaattttggcggagagtgtttgccaggtttcaatgtgggctgcagctttttgtgctccttctctggtttgcagtgtaatgagttcataagctaaattttcagaaagaattttgtttaagattatgcctcttatctacttgagagcaacatgtcttttcaatcatgggattgacacatgaaaaataaagttatttcttaatcaa

SEQ ID NO: 337 - DNA, 1552 bp, Homo sapiens
ggcacgaggagaggaccccagagagccctgagcagccccaccgccgccgccggcctagttaccatcacaccccgggaggagccgcagctgccgcagccggccccagtcaccatcaccgcaaccatgagcagcgaggccgagacccagcagccgcccgccgccccccccgccgcccccgccctcagcgccgccgacaccaagcccggcactacgggcagcggcgcagggagcggtggcccgggcggcctcacatcggcggcgcctgccggcggggacaagaaggtcatcgcaacgaaggttttgggaacagtaaaatggttcaatgtaaggaacggatatggtttcatcaacaggaatgacaccaaggaagatgtatttgtacaccagactgccataaagaagaataaccccaggaagtaccttcgcagtgtaggagatggagagactgtggagtttgatgttgttgaaggagaaaagggtgcggaggcagcaaatgttacaggtcctggtggtgttccagttcaaggcagtaaatatgcagcagaccgtaaccattatagacgctatccacgtcgtaggggtcctccacgcaattaccagcaaaattaccagaatagtgagagtggggaaaagaacgagggatcggagagtgctcccgaaggccaggcccaacaacgccggccctaccgcaggcgaaggttcccaccttactacatgcggagaccctatgggcgtcgaccacagtattccaaccctcctgtgcagggagaagtgatggagggtgctgacaaccagggtgcaggagaacaaggtagaccagtgaggcagaatatgtatcggggatatagaccacgattccgcaggggccctcctcgccaaagacagcctagagaggacggcaatgaagaagataaagaaaatcaaggagatgagacccaaggtcagcagccacctcaacgtcggtaccgccgcaacttcaattaccgacgcagacgcccagaaaaccctaaaccacaagatggcaaagagacaaaagcagccgatccaccagctgagaattcgtccgctcccgaggctgagcagggcggggctgagtaaatgccggcttaccatctctaccatcatccggtttagtcatccaacaagaagaaatatgaaattccagcaataagaaatgaacaaaagattggagctgaagacctaaagtgcttgctttttgcccgttgaccagataaatagaactatctgcattatctatgcagcatggggtttttattatttttacctaaagacgtctctttttggtaataacaaacgtgttttttaaaaaagcctggtttttctcaatacgcctttaaaggtttttaaattgtttcatatctggtcaagttgagatttttaagaacttcatttttaatttgtaataaaagtttacaacttgattttttcaaaaaagtcaacaaactgcaagcacctgttaataaaggtcttaaataattgtctttgtgtaaaaaaaaaaaaaaaaaaaaaaaaaaaaaaaaaaaaaaaaaaa

SEQ ID NO: 338 - DNA, 5985 bp, Homo sapiens
  modified_base (321)..(321): a, c, g, t, unknown, or other
  modified_base (1124)..(1124): a, c, g, t, unknown, or other
  modified_base (1128)..(1128): a, c, g, t, unknown, or other
  modified_base (1134)..(1134): a, c, g, t, unknown, or other
  modified_base (2260)..(2261): a, c, g, t, unknown, or other
  modified_base (2264)..(2264): a, c, g, t, unknown, or other
  modified_base (2266)..(2277): a, c, g, t, unknown, or other
  modified_base (2768)..(2771): a, c, g, t, unknown, or other
  modified_base (2934)..(2934): a, c, g, t, unknown, or other
  modified_base (3042)..(3042): a, c, g, t, unknown, or other
  modified_base (3122)..(3122): a, c, g, t, unknown, or other
  modified_base (3233)..(3234): a, c, g, t, unknown, or other
  modified_base (3695)..(3695): a, c, g, t, unknown, or other
  modified_base (4080)..(4094): a, c, g, t, unknown, or other
  modified_base (4097)..(4097): a, c, g, t, unknown, or other
  modified_base (4100)..(4100): a, c, g, t, unknown, or other
  modified_base (4132)..(4133): a, c, g, t, unknown, or other
  modified_base (4137)..(4138): a, c, g, t, unknown, or other
  modified_base (4140)..(4143): a, c, g, t, unknown, or other
  modified_base (4146)..(4158): a, c, g, t, unknown, or other
  modified_base (4241)..(4241): a, c, g, t, unknown, or other
  modified_base (4320)..(4320): a, c, g, t, unknown, or other
  modified_base (4582)..(4582): a, c, g, t, unknown, or other
  modified_base (4772)..(4772): a, c, g, t, unknown, or other
  modified_base (4794)..(4794): a, c, g, t, unknown, or other
  modified_base (4853)..(4853): a, c, g, t, unknown, or other
  modified_base (4876)..(4876): a, c, g, t, unknown, or other
  modified_base (4912)..(4912): a, c, g, t, unknown, or other
  modified_base (5379)..(5380): a, c, g, t, unknown, or other
  modified_base (5486)..(5486): a, c, g, t, unknown, or other
gacagcggaggatggaagcgagaccggggctggaggcgggccgaggccgcgagttgagcctcaggaagcagaaggggcgcggaaagatgcgattgacgtcgcaagcgaaccaatgacgagcgagctgtggcaggcctccagccaatgggcagtgaggcctgacgcggggggcggacgctggggccgagggtagcttgagcgcggcggcggcgttgttcagtcagagcgagaacattccagaggtcgcccagctccggcgctgacgggtgtggaccgcggacgtcgctgggacagcccctccccgctgctcggcggcggcanctggcccggccgctcctcgctgcgcttcgcctccgcctcctcggactcggactcgggtttatatcgcgcctcacttcatcccagtcccgggcgagcagcgttgggtttatgtctttatttgacgaaaacgagctgttgcgcagccattggtacctgtattggggaaacatagcatacaagcaagaagcttacagcctcagtggcgaaaattttttcatgtcagagaccgagaactcttgcagtcgtttatgtcatcccttcttctccagacagaagataccaaaaagttgcaatcaaagatctcttcatcttattgataaagccactaataagccaaaatgtctgtcaatgtcaaccgcagcgtgtcagaccagttctatcgctacaagatgccccgtctgattgccaaggttgagggcaaaggcaatggaatcaagacagttatagtcaacatggttgacgttgcaaaggcgcttaatcggcctccaacgtatcccaccaaatattttggttgtgagctgggagcacagacccagtttgatgttaagaatgaccgttacattgtcaatggatctcatgaggcgaataagctgcaagacatgttggatggattcattaaaaaatttgttctctgtcctgaatgtgagaatcctgaaacagatttgcatgtcaatccaaagaagcaaacaataggtaattcttgtaaagcctgtggctatcgaggcatgcttgacacacatcataaactctgcacattcattctcaaaaacccacctgagaatagtgacagtggtacaggaaanaaanaaaaanaaaagaaaaacagaaagggcaaagacaaggaaaatggctccgtatccagcagtgagacaccaccaccaccaccaccaccaaatgaaattaatcctcctccacatacaatggaagaagaggaggatgatgactggggagaagatacaactgaggaagctcaaaggcgtcgaatggatgaaatcagtgaccatgcaaaagttctgacactcagtgatgatttggaaagaacaattgaggagagggtcaatatcctctttgattttgttaagaaaaagaaagaagagggtgttattgattcatctgacaaagaaatcgttgctgaagcagaaagactggatgtaaaagccatgggccctcttgttctaactgaagttctttttaatgagaagattagagaacagattaagaaatacaggcgccatttcctacgattttgtcacaacaacaaaaaagcccaacggtaccttcttcatggtttggagtgtgtggtagcaatgcatcaagctcagcttatctccaagattccacatatcttgaaggagatgtacgatgcagaccttttagaagaagaggtcatcatcagctggtcggaaaaggcctctaagaaatatgtctccaaagaacttgccaaagagattcgtgtcaaagcagaaccatttataaaatggttgaaggaggcagaggaagaatcttctggtggcgaagaagaagatgaagatgagaacattgaggtggtgtattcgaaggctgccagtgtaccgaaagttgagactgtaaagtcagacaacaaggatgacgacatcgatattgatgccatttaaagggatggatgcaacctagcttaacagtataatgctgcaaattttcctccattatcagccagaagtgcaacatgtatgtgcaaaagctaaaatggcttaacatcatgctacactttacactaaaaatctattactgtgagtggtctgttattaagcccaatgagacatctagggagtccatacacatcagtgagcagatgtagtttgcttatttatagcatgtttctttttgaaaaactagtggtggacacatttggatcacatttatacagttataaaaataaaggtttgattttggtcgttcnncanannnnnnnnnnnnaatgacttaagctgaagtaactggctccttactttaaatgttctgccatcatttcacctgatgagcattcttggagcctgccagatattgttaggtcctggggctgcaaagaggtcctcaacaggatgtaaagcaaacttaattgtaattaatttattcagcccattaagaaagtactaaagttttatctctgtagttcctcaaattggcatctggtaatgtacattgtgaggtagactgataatgaaatgacagtgcaacatcttaaccaagaagtaaatatgacctcagtgtcctataaataatgtaagagcaggatttgaaacttggagagctgttttctcatttcatgtacacttgccccaaattgtctttgaagtcgtgtgcattgcacgttggatgagccagggaaattattacattaacaagcattttgtgtgtacgtagtagttactttgtactgagagaacttgctttggggtgcaattaannnntaaactgattttatttgggagaaacaaggaagggtgcacttaactagcaacctaagcatgatttttcagcttttgcccttagggtttaaattacaattccaaaatgttagacatactgtattttttcgttcagtgtggctttaattttcccctcttgcagttngttctgtaatgccttttacatttggacacatagtttatgctttttagattttggttgctttcttgccaaaataagtgttaactgtgtttcaaacttgattttctttcntttttcttttttttttcttccagaatgtcttatttaaaaagaaagctaaaagcatacttctaagtcagagcctctatttnggtgtaagacttgggatattttttacttcacattgaatatagccaggcacccaagaagtctgatggccacctgagtgcaggtgacaaggacctgacagagcccatgcaggnntttagatttggacacacaagagttgataacttcctcatgaactccttgcctgatctaaactcatattatgggttctgactgtttgagtaatcatcttcaaggttaaacctcttggcagttacccttttcacaaagtgcacagtgggaatcgagaatcgatagggttaattttggagcagtggcttataccattcacctctgtttttttgtgattatttcacagataatgagaccttaataacaaataggcgtaaaaaaattttcacattgaaatgatagaaacatttgatgtaataaaacttggttggcttgatattttaaggaattgaaacctagcaatcttattggagagacaagaattggtctccagctgcctttgatcaagattcgggtgcaagtggagcaggagccatatacctggagggaatgtgctttgtcacaccaaagaggatttttttttncttcaaacttgtatgttgcctaggtttcaaattctttgccgcaaggctgatctgctttcattaactggaattctgtaggagatactggtgacctaagctaagttgcactcagcatactcagtgtcaagctaatgaggttctattataaaggttctacttttaatctgagggaaaacatgttcagggcttctagaacactaaaaaatttggcttaaaccagtgttcagtctggtgccaaacttcgaatggaatacaaattcacataatctgaactttgttcacaggttatcctaatagagtaattcttcactttgctctattgaactgtcttaaggatttgtttaaacagctaagttacttgattaaaataatgataaaattgtannnnnnnnnnnnnnnaanatnaaagttaacaagttttcattttataatgagannaaannannnnaannnnnnnnnnnnngtagccgttgctttggatttgtgttggatgtatcctgcagttacacttgccagccccactcacaaaagttgttcatttcattngggtcactggctttatttgctagtcttgtctgtgaactgagcatctgcctcagttttattacttgaaatcttggcaggngcttaatagggaacatacatacagctatgtaactgtgaataattgtatatatctctagttaagaatgagggaatggggaggtttgctttctaaacaagtgcattctgaaattgacttaaaaatttttagtgtgggtcctaaagtttagagatgggcaaggaggtctctaatccaccgcttcccgcttgagaagggaggggtatcaaaattgagccccaagctgtttgttccagtgtaccaagcactgactttatgcctttgncctggagatggcagaagtgaaagctggccatctgcaaaaagcagataagtgagtttgaaccttttgcattttgttagctcagtcagtcctcatcgtggtcctgaggcataggtactgttgtaccaaggtcacttatctaacaaaataacccttcatgtattttaaatttatttgacaagtctgcagacanatccttatctaaccagctattntcttaattgctacagcttgacctaccagtattccggagtaaccagcaaatgcaaagttnaccttgttcctgcatcatctttntgatggttcaaatttcagcctccctgactactacanagccagagcagtcttagtaccagaaacagtgttgcactttcgttgcatgtgctgtgtgaccccaaggggacagggagtcactttggtcatctctgtccccagtacagatcttgattcatagtgacattccataagtggggtgacagcaaatgacttgcaggtagtctcattgtaggtttgtgcaccagagtgaccctgtgagcctttgttaataggttgggagctcagggtgtttatgtccacctgtctggtctagccaaacagtttttttctgggaatcaaatttctgtggtttttatggccagaaattttaaggacttgtgtgtgctgggatatgagaatagaagctacagagttcttttcttgggacctagactgggaggtgcaatgtcaggacctccaggtgaatggtaggatctgagttgaccctgcagttcggttatgcagtcaattatttctttttaagnngaggaggattcacttgggtgttgggatcaaatttggattctgtcccaggccttactgtaaaactaggggattgcctttccatatctgctgggggtggagacccttntgtgcagcactcaatcccactggaagcctaatgctgcagtcagaagcaatgcctggctggggcagtaggggaaattccacccaattttgctatgagcctaaaacctctttaaaaacggtcagttaactaaaaaataaaaatcaagtctttaggagagtagaaaacacaattaactaaaaagcagggacatctgaaagagacgtattaagttaacatttttaaaaatccaaatgaaagtaaatggaataaatgtatcaggtaaaggacaagttgtaagcttggatttttaggtctagcaatacactgtttacaagagcatcacctaaaatgtgacaaaagatgttgaaaggatgaaaaaaggtatagtagacatacactaaccaaaaatgtagctctttgaatctcagaaaaaagtagattttaataaagtgtgaaagttgtcaatcaaaaaaaaaaaaaaaaaaaaaaaaaaaaaaaaaaaaaaaaaagggcggccgct

SEQ ID NO: 339 - DNA, 975 bp, Homo sapiens
cccaccaccagcgcagcagtcctggagctgacccattccaacaatctcgtaaaacatggtggattactatgaagttctaggcgtgcagagacatgcctcacccgaggatattaaaaaggcatatcggaaactggcactgaagtggcatccagataaaaatcctgagaataaagaagaagcagagagaaaattcaagcaagtagcggaggcatatgaagtgctgtcggatgctaagaaacgggacatctatgacaaatatggcaaagaaggattaaatggtggaggaggaggtggaagtcattttgacagtccatttgaatttggcttcacattccgtaacccagatgatgtcttcagggaattttttggtggaagggacccattttcatttgacttctttgaagacccttttgaggacttctttgggaatcgaaggggtccccgaggaagcagaagccgagggacggggtcgtttttctctgcgttcagtggatttccgtcttttggaagtggattttcttcttttgatacaggatttacttcatttgggtcactaggtcacgggggcctcacttcattctcttccacgtcatttggtggtagtggcatgggcaacttcaaatcgatatcaacttcaactaaatggttaatggcagaaaaatcactacaaagagaattgtcgagaacggtcaagaaagagtagaagttgaagaagatggccagttaaagtccttaacaataaatggtaaggagcagctgctgcgcttggataacaagtaattcaacgcacgcacttaacagaaatgttaaactataacaagcaccatttgaggattaacaggaacatttttttgaagatttcaaacgaactcgactttcagtataattgtacctaaagtatttataaacagctcatcggagcctctatttgtcatagacttttgagttgattgttgggaccacataataggacat

SEQ ID NO: 340 - DNA, 975 bp, Homo sapiens; identical to SEQ ID NO: 339

SEQ ID NO: 341 - DNA, 5964 bp, Homo sapiens
  modified_base (139)..(139): a, c, g, t, unknown, or other
  modified_base (141)..(141): a, c, g, t, unknown, or other
  modified_base (143)..(144): a, c, g, t, unknown, or other
  modified_base (148)..(150): a, c, g, t, unknown, or other
  modified_base (1137)..(1137): a, c, g, t, unknown, or other
  modified_base (1163)..(1163): a, c, g, t, unknown, or other
  modified_base (1704)..(1704): a, c, g, t, unknown, or other
  modified_base (1739)..(1739): a, c, g, t, unknown, or other
  modified_base (3369)..(3369): a, c, g, t, unknown, or other
  modified_base (3555)..(3555): a, c, g, t, unknown, or other
  modified_base (4354)..(4354): a, c, g, t, unknown, or other
  modified_base (5181)..(5181): a, c, g, t, unknown, or other
  modified_base (5207)..(5207): a, c, g, t, unknown, or other
  modified_base (5264)..(5264): a, c, g, t, unknown, or other
  modified_base (5358)..(5358): a, c, g, t, unknown, or other
  modified_base (5375)..(5375): a, c, g, t, unknown, or other
  modified_base (5461)..(5461): a, c, g, t, unknown, or other
  modified_base (5515)..(5515): a, c, g, t, unknown, or other
  modified_base (5563)..(5563): a, c, g, t, unknown, or other
  modified_base (5631)..(5631): a, c, g, t, unknown, or other
  modified_base (5825)..(5825): a, c, g, t, unknown, or other
  modified_base (5903)..(5911): a, c, g, t, unknown, or other
  modified_base (5914)..(5922): a, c, g, t, unknown, or other
  modified_base (5930)..(5934): a, c, g, t, unknown, or other
  modified_base (5936)..(5937): a, c, g, t, unknown, or other
  modified_base (5939)..(5940): a, c, g, t, unknown, or other
  modified_base (5950)..(5951): a, c, g, t, unknown, or other
  modified_base (5956)..(5958): a, c, g, t, unknown, or other
  modified_base (5960)..(5962): a, c, g, t, unknown, or other
tttggtttcattgtaaatacatatgatttattaaaaatataaactgatggtattctctataaattattccccaaacacattaaaagatgtgataatagatataaatttgcaaaccatttatagccaccctccccctttnantnntttnnntttttttttttttactgtaggtttatttttattcaaaaagttactgtctcaagacataaatacaaatcagaaaacagtacaattaggacaatagaatgtggaggacaacaggttagagtaatatataaaacatttttagctggttgaaaacaaagctgtaagaactgctttcacaaagaagtactcctttcaagagtgagaaaaaaaatcaacttaggtttaaaatcatatatacagtcctctcagcagttctagttaatgcagtggtgtgtaaaacaacataggcaatacttttgcacataacaatatttgttgatggaaaatctgttagacaagtctggattcatttgttattaaccatgacttaataaaataattgtatcatgatctttttagctaacctatggtttttggctaccacagcccaatgcttgatttctgactaaaaactgaaagccttttggtattcacccatctgaagatattcttgtattgcaagcatattaaggcatggaatgattaaaataatatacctcaagaactgagagacgactgacaatagatagatacacatgtaatataagttaatattttgttttaaacgatgtctagctgcctaagcctcgcaaaatgagttgatgtcaaaatggcaagtagccactttctgttttaaactaatttatttgtgaaaggacataaaatgaagtttaaagcttagctttcaaagaatattatgggttatgaattctattatcccatctaatttacatacagaggaaatgtactgtaacctgttagaagtatctttaacctgaagactgcttgcaaagacagatagataaaacaatataaaatacaaatttaaaaatcattttaaagcatgaacactcatgcttttctatttttaaacattgttaaactttcaatatatttctgaaacctcataattttaagttggaatttaaaagtaagaaaaaactaaacaanctgcgcaattataaaatcagcaccantttatatatatatataattttatttaaaatttagatccctattcccacactctaataagctgtataatttttgtttagaatttttctgcaaacatactacaataagcttcttttatttggagacaaaatacagtggcattactggaaggaatatcacaacattacatttttatcttaaaggacaagcaaactttcagggttgataatgggataagcatgtttgagactggttaccttctggcagttcactgcatctggatatttctgaaaagtatagagaagctcttggattttaaaaatatcttaaaatacttttagatgaaaaaattgtaaaagttctgcttataagtttacttttctccacaattacaatatttaaaacaaagttttgttgattgacgttttaagcatttaaatttagaatgctaaaaacaattctatcctacactttcttcagggtaggggaataaatacatccttaacattgttttctggatgtaaacagaaatccagcagaggtcatcattatttagtacaaccnagtaaataaatgtaagagaattcatatctgtaccnaatgcctcttcagattgttattttgttttttttttttttttaaaaaaaagcatgaaataatcgattcaaaagccaactaacagcgcataaataaaatatttactttctaagaaaaactgtagcttatcatcaaattgtttacttgtcctttacgtttattcaggcaaacaaaactgcccctcaatgcacttgatcttggtaagcataagcatgtcatattctccttagagaaaaatctgtacagaatttcactgtatctaccacactttaaaatttcctcttccacttagaaaatgacttcaccacagatttaattgtgtactggtattaaaacattgacactccaagaactgattcatccataattgaagctggatcaaagaaatcaggcttcagttctgttctctctcgtctgttctttgatggtggcaaatctatatccatggtgtcaaaatccattccctcattaagatcctcaatcctcccttctgaggacatcataacatcttccacaattggctcttcatcatcttccattaggcttgtgccacgccgattataatcaagaggtgtttgatgatgttcagtctgcattggataaacactcatgaagctatcctcaggccgtaatcttttgggctctctcataatagtggaggtgagttgtggtgtctgcatcataacaggggtgtgcagtgtttgttctctgcttaaccacatactgtcactactactactttcttcagtgagtgaaagctgcatgccctcaaccactttccgttttcctgtagatggttttgattttttactccgtactgttgacccccggctgctgattccactaatgactgacatggtgtcatcatcaccaccagctagcaaagaatttcggtaagacatcagtggaagccacacatcctctcttcggagtgacatctgaaaggtcatgaacttttccaagtaaacatacactgttcttttgtcttgtcgaagtagtttagaagaaaattcactcagaatatcaagaaatgccaaatttaaaggtggatggctctccccttgcggattaggctctttaaaagcaaattctatgccatctttgtgtagcatggcaatggcttctcttgttttcaactgatcaagtccaaaagttaaagcaaaacgtcgagcaagttcttttatgccactaaatgtagaggatgatctatcaaaattatagccattttcttgtatcatttcattaaaaagctgttgcagactgagaataagggtcttagcacactgaattttgtctatctgccttgttttactcattgtttctttgatgatatctccatagtcattataatacttcatatactgtttgaagatatctgcagctgtattcatctccaccacagtatatacaattagcttacaaaatgctgcaagtaaatttcttctcttgtgcagagcttcaattttactggcttcatcctcttgctgaccatctgcactattattatcatcatcctgttcaatgaagacatgatccaaaataaagctgagcaactcagactgcaatgaagaatcaggggtatacactaatggctctaacatgtcacgccctcctgacataatctgatggctngaagatcatcaaaatatcacacagaatagtgaaggcctgttccttaacagtagtattcacgttggtcaggtaatgttgacatatctgacaaaatactctcatttgtttctttaaacgcagcaagtcctcctttgtagagctgctttcagttatcttagcaagttgccaaaggattacatagtgagnacactgcagtgcgtgaataacaatctgctcaggcatgtctccattttcgattccagttttcaagagtttgtaattacaagcaaataaatcccactttgaaaggtcatgggcattatgaaaagcagtgatcctcttcaatgttgacaatacctgatatgcatcatcttcatcaggttcttcaccctcttgcagaaaatcttcaagaagccggttaaatttatctgccaattcatctatcagttgacttcttgaaatatctactctgttgaagattgtgaactcttcattacagagtgcatggtaagttttagaacatgcttccaaaacatctgtatctgtgtgcttctctacaatattccggatctgtcgcaataaggcatccaaatgcttttctaatcgtccagtggtatatatttccaaatcaaagtactgaggcaactgcaacaagttagtcaccttttctgcatctacagagtattttgctaataactgaggaagggccacggcaaaaagctcagtgatttttgtcctatcatccaactgtgtcttcttctcctttgctgtaagcaccctttttcctgtccctcttcccacgggaggatgacattcagccgcttgtctaatggtacaaagcattatttcaatcagagcactctcttgcctatctgttagtgcttcctctccactaagtggctcttccagtaacaagctattcatacattcccagtctttcagcagctcagtagcacagtcccacatgctatccacaaggtatgctgcatgctcatgtaactcactnttctagaaagaaaaaaaccaatgtcttaacaaggttggcatttggaccttgtcttcctcttcttttcatcattccatcctcctctggatctctacgactgaagagctttttgtagagaaattctccagctgctactgctactggccggtgagctgaataaaccagatgatagacattttcacaatcttctgcagtgagaacttcttcactactctgtaaaacaagagtgagtaattttattgcttgtactgcaacatcatattctttgtcaagggtcatagacacaattctatccttgaaccgactggtaaaaagttccagtttggaattaagctctttgttataataaagcccttgtagagcagtaagacatttgagtcttacttcaccttgcttatcatgcatagtccaaccaacatattttaaataactgtcattaagaaaggcatcactatacatcttcatccaaatgccaatctcttcaatgcaaatagctcgaatttcagctatcgcatcacggtatctatgtacaaacactcctttaaatattgcattcatcatattttctatttcatcttgattttcctgaagctctttccgcttttgtagcaggagttctagcctctcattggctcgttttccaatcattttattccgttctgcttcatattgtctttgtgtattatccatattaatgctaagatttagtgccacattcaccaaagctgtcatcaacttcatagctgccagggtgcttgtatgtcgaaatgctctgacttgtgagtcagacaatcctgtaagaagtgaaatgactgtatccatcatanactcatcatatatgatactatattgncattgccgtactaacacgccaatgaattcacaaaaactggatttgaacttcttccantgaggaccagccatggtaagtggataatctccactatcctcatcgaattcttcagtcatttttcgaattatctcagagttctgcatatgtctanacatttctgctgtgacnactcctttacagcctgaacactgaataaaaaagttgataaggtcaagaagtgctatatctcggtcatgcttgtatgattctatccnatcatctaccaccgactgcatagcactcttgcccattttaacaacttcaaacancatcatgttttccactccattctgttggtgatgaccattcattcggtntggaccagaaggaggttttcctcctccatttccacctttgcccttttctgctgggccctttttgcctntttttacaagttttgcctttgccttgcttttggttttttccttcgatatcttcaaaatctgtgtcagaagaaaaatgtgtttctgactcctgtagtagattaaaatcagttggtatttctggagctgctatcatttctttatcatcttctggaacacctcaatgtcagaaatatattcatatatttacgtgggntaaaatggtggcttgccttctttcttctaagacaattccgaagtcgggcctcggaagggatggagagatcgatgccannnnnnnnnccnnnnnnnnncccccacnnnnngnngnngatgatgggnnggggnnnannnag

SEQ ID NO: 342 - DNA, 688 bp, Homo sapiens; identical to SEQ ID NO: 185

SEQ ID NO: 343 - DNA, 1288 bp, Homo sapiens
aaggaacgccggctcttcgcctctcagcgcggcttgtcctttgttccggacgcccgctcctcagccctgcggctcctggggtcgctgctgcatcccgcacgcctccaccggctgcagacccatggccgagcgcggggaactcgacttgaccggcgccaaacagaacacaggagtgtggctagtcaaggttcctaaatatttgtcacagcaatgggctaaagcttctggaagaggtgaagttgggaaactgcggattgccaagactcaaggaaggactgaggtgtcatttactttgaatgaggatcttgcaaatattcatgatattggtggaaaaccagcttcagtcagtgctcctagagaacatccatttgtcttgcaaagtgttggaggacagacattaacagtatttactgagagctcatcagataagctgtcattggaaggaatagtggtacaaagagctgaatgccgaccagctgccagtgaaaactacatgcgattaaaaagattgcaaatagaagagtcttccaaaccagtgaggctatcacaacagctggacaaagttgtaacaaccaattacaaacctgttgctaatcatcaatacaatatcgaatatgaaaggaaaaagaaagaagacggaaagcgagctcgagctgataaacaacatgttttagacatgctattttcagcctttgagaaacatcaatactataatcttaaggacttggtggacatcacaaaacaacctgtggtgtacctgaaggaaatcttaaaagaaattggtgttcagaatgtaaaagggatccacaaaaacacatgggagctgaagccagagtacagacactatcaaggagaagaaaagagtgactaagaagactcctagccagcatgctagtgaaacgactagcagcgatgctatgcaaaaggcgctgatactggaaggcttgaacaccgtatgttaataggggttaagtgacagtactttgatttctctcggtaaattttttaaacctgtaattcttgtaaagtttcttaactgtttttttgaggagaaagaacagatttatttatagacttaacttgtattaaaccagattattcacagtaggaataggggttggaggattaagagggtttttcttaaatattagcttttaatgtgtacaattaggaaatttttttaagtgaggactctctacccttgccgtatctaaggagctgaggtaatacagatccaaggagaattgtatagcaagaaaaaaaaaaaaaaaaaaaaaaaaaaaaaaaa

SEQ ID NO: 344 - DNA, 2196 bp, Homo sapiens
cggggtgtcttgggcccgggcggctgtagaggcggcggcgcctacgggcagtgggaggagccgcgcggttccggctgctccggcgaggcgacccttgggtcggcgctgcgggcaggtggcaggtaggtggcggacggccgcggttctccggcaagcgcaggcggcggagtcccccacggcgcccgaagcgcccccccgcacccccggcctccagcgttgaggcgggggagtgaggagatgccgacccagagggacagcagcaccatgtcccacacggtcgcaggcggcggcagcggggaccattcccaccaggtccgggtgaaagcctactaccgcggggatatcatgataacacattttgaaccttccatctcctttgagggcctttgcaatgaggttcgagacatgtgttcttttgacaacgaacagctcttcaccatgaaatggatagatgaggaaggagacccgtgtacagtatcatctcagttggagttagaagaagcctttagactttatgagctaaacaaggattctgaactcttgattcatgtgttcccttgtgtaccagaacgtcctgggatgccttgtccaggagaagataaatccatctaccgtagaggtgcacgccgctggagaaagctttattgtgccaatggccacactttccaagccaagcgtttcaacaggcgtgctcactgtgccatctgcacagaccgaatatggggacttggacgccaaggatataagtgcatcaactgcaaactcttggttcataagaagtgccataaactcgtcacaattgaatgtgggcggcattctttgccacaggaaccagtgatgcccatggatcagtcatccatgcattctgaccatgcacagacagtaattccatataatccttcaagtcatgagagtttggatcaagttggtgaagaaaaagaggcaatgaacaccagggaaagtggcaaagcttcatccagtctaggtcttcaggattttgatttgctccgggtaataggaagaggaagttatgccaaagtactgttggttcgattaaaaaaaacagatcgtatttatgcaatgaaagttgtgaaaaaagagcttgttaatgatgatgaggatattgattgggtacagacagagaagcatgtgtttgagcaggcatccaatcatcctttccttgttgggctgcattcttgctttcagacagaaagcagattgttctttgttatagagtatgtaaatggaggagacctaatgtttcatatgcagcgacaaagaaaacttcctgaagaacatgccagattttactctgcagaaatcagtctagcattaaattatcttcatgagcgagggataatttatagagatttgaaactggacaatgtattactggactctgaaggccacattaaactcactgactacggcatgtgtaaggaaggattacggccaggagatacaaccagcactttctgtggtactcctaattacattgctcctgaaattttaagaggagaagattatggtttcagtgttgactggtgggctcttggagtgctcatgtttgagatgatggcaggaaggtctccatttgatattgttgggagctccgataaccctgaccagaacacagaggattatctcttccaagttattttggaaaaacaaattcgcataccacgttctctgtctgtaaaagctgcaagtgttctgaagagttttcttaataaggaccctaaggaacgattgggttgtcatcctcaaacaggatttgctgatattcagggacacccgttcttccgaaatgttgattgggatatgatggagcaaaaacaggtggtacctccctttaaaccaaatatttctggggaatttggtttggacaactttgattctcagtttactaatgaacctgtccagctcactccagatgacgatgacattgtgaggaagattgatcagtctgaatttgaaggttttgagtatatcaatcctcttttgatgtctgcagaagaatgtgtctgatcctcatttttcaaccatgtattctactcatgttgccatttaatgcatggataaacttgctgcaagcctggatacaattaaccattttatatttgccacctacaaaaaaacacccaatatcttctcttgtagactatatgaatcaattattacatctcgacccggaat

SEQ ID NO: 345 - DNA, 932 bp, Homo sapiens
atgtctgctgaagtcatccatcaggttgaagaagcacttgatacagatgagaaggagatgctgctctttttgtgccgggatgttgctatagatgtggttccacctaatgtcagggaccttctggatattttacgggaaagaggtaagctgtctgtcggggacttggctgaactgctctacagagtgaggcgatttgacctgctcaaacgtatcttgaagatggacagaaaagctgtggagacccacctgctcaggaaccctcaccttgtttcggactatagagtgctgatggcagagattggtgaggatttggataaatctgatgtgtcctcattaattttcctcatgaaggattacatgggccgaggcaagataagcaaggagaagagtttcttggaccttgtggttgagttggagaaactaaatctggttgccccagatcaactggatttattagaaaaatgcctaaagaacatccacagaatagacctgaagacaaaaatccagaagtacaagcagtctgttcaaggagcagggacaagttacaggaatgttctccaagcagcaatccaaaagagtctcaaggatccttcaaataacttcaggctccataatgggagaagtaaagaacaaagacttaaggaacagcttggcgctcaacaagaaccagtgaagaaatccattcaggaatcagaagcttttttgcctcagagcatacctgaagagagatacaagatgaagagcaagcccctaggaatctgcctgataatcgattgcattggcaatgagacagaaaacgcccactcctggatcttcacattgaactcaatggctacatgtatgattggaacagcagagtttctgccaaggagaaatattatgtttggctgcagcacactctgagaaagaaacttatcctctcctacacataa

SEQ ID NO: 346 - DNA, 1582 bp, Homo sapiens
ggcacgaggcttccccggtgcagacacccggcgaagcccacccggttttcccagcggcatttccgatgacagcttcggggctacgtgtcctgtgctgtcggagacgcacaggaagcaaagtttgtgagaagccttgggggcgactttgccttgggcacccgcatttgtgcgtctgcgaggtgcctcggtgtgcgcggagctagtttcccagtttcccgggcccctcccttctccgagcccctctagcgatttgtttaggaaaagtgatgacatgaactagtagtggagaatcgcagcgccgctccccgccctggggagggaggggagccccggagagcctgccggtgggagctggaagcaggctcccggctgagcgccccagcccgaaaggcagggtctgggtgcgggaagagggctcggagctgccttcctgctgccttggggccgcccagatgagggaacagcccgatttgcctggttctgattctccaggctgtcgtggttgtggaatgcaaacgccagcacataatggaaacaggacctgaagacccttccagcatgccagaggaaagttcccccaggcggaccccgcagagcattccctaccaggacctccctcacctggtcaatgcagacggacagtacctcttctgcaggtactggaaacccacaggcacacccaaggccctcatctttgtgtcccatggagccggagagcacagtggccgctatgaagagctggctcggatgctgatggggctggacctgctggtgttcgcccacgaccatgttggccacggacagagcgaaggggagaggatggtagtgtctgacttccacgttttcgtcagggatgtgttgcagcatgtggattccatgcagaaagactaccctgggcttcctgtcttccttctgggccactccatgggaggcgccatcgccatcctcacggccgcagagaggccgggccacttcgccggcatggtactcatttcgcctctggttcttgccaatcctgaatctgcaacaactttcaaggtccttgctgcgaaagtgctcaaccttgtgctgccaaacttgtccctcgggcccatcgactccagcgtgctctctcggaataagacagaggtcgacatttataactcagaccccctgatctgccgggcagggctgaaggtgtgcttcggcatccaactgctgaatgccgtctcacgggtggagcgcgccctccccaagctgactgtgcccttcctgctgctccagggctctgccgatcgcctatgtgacagcaaaggggcctacctgctcatggagttagccaagagccaggacaagactctcaagatttatgaaggtgcctaccatgttctccacaaggagcttcctgaagtcaccaactccgtcttccatgaaataaacatgtgggtctctcaaaggacagccacggcaggaactgcgtccccaccctgaatgcattggccggtgcccggctcatggtctgggggatgcaggcaggggaagggcagagatggcttctcagatatggcttgcaaaaaaaaaaaaaaaaaaaaaaaaaaaaaaa

SEQ ID NO: 347 - DNA, 1543 bp, Homo sapiens
  modified_base (52)..(55): a, c, g, t, unknown, or other
  modified_base (107)..(107): a, c, g, t, unknown, or other
  modified_base (738)..(738): a, c, g, t, unknown, or other
  modified_base (1093)..(1093): a, c, g, t, unknown, or other
  modified_base (1121)..(1122): a, c, g, t, unknown, or other
  modified_base (1360)..(1360): a, c, g, t, unknown, or other
  modified_base (1518)..(1519): a, c, g, t, unknown, or other
ggacgtggggcggtgcgcggggctgggcggcggctgaggcgcgtgctctcgnnnngtcgctgggtctgcgtcttcccgagccagtgtgctgagctctccgcgtcgcnctctgtcgcccgcgcctggcctaccgcggcactcccggctgcacgctctgcttggcctcgccatgccggtggacctcagcaagtggtccgggcccttgagcctgcaagaagtggacgagcagccgcagcacccgctgcatgtcacctacgccggggcggcggtggacgagctgggcaaagtgctgacgcccacccaggttaagaatagacccaccagcatttcgtgggatggtcttgattcagggaagctctacaccttggtcctgacagacccggatgctcccagcaggaaggatcccaaatacagagaatggcatcatttcctggtggtcaacatgaagggcaatgacatcagcagtggcacagtcctctccgattatgtgggctcggggcctcccaagggcacaggcctccaccgctatgtctggctggtttacgagcaggacaggccgctaaagtgtgacgagcccatcctcagcaaccgatctggagaccaccgtggcaaattcaaggtggcgtccttccgtaaaaagtatgagctcagggccccggtggctggcacgtgttaccaggccgagtgggatgactatgtgcccaaactgtacgagcagctgtctgggaagtagggggnttagcttggggacctgaactgtcctggaggccccaagccatgttccccagttcagtgttgcatgtataatagatttctcctcttcctgccccccttggcatgggtgagacctgaccagtcagatggtagttgagggtgacttttcctgctgcctggcctttataattttactcactcactctgatttatgttttgatcaaatttgaacttcattttggggggtattttggtactgtgatggggtcatcaaattattaatctgaaaatagcaacccagaatgtaaaaaagaaaaaactggggggaaaaagaccaggtctacagtgatagagcaaagcatcaaagaatctttaaggnaggtttaaaaaaaaaaaaaaaaaaaaanngattggttgcctctgcctttgtgatcctgagtccagaatggtacacaatgtgattttatggtgatgtcactcacctagacaaccagaggctggcattgaggctaacctccaacacagtgcatctcagatgcctcagtaggcatcagtatgtcactctggtccctttaaagagcaatcctggaagaagcaggagggagggtggctttgctgttgttgggacatggcaatctagaccggnagcagcgctcgctgacagcttgggaggaaacctgagatctgtgttttttaaattgatcgttcttcatgggggtaagaaaagctggtctggagttgctgaatgttgcattaattgtgctgtttgcttgtagttgaataaaaatagaaacctgaatgaannaaaaaaaaaaaaaaaaaaaaaaaa

SEQ ID NO: 348 - DNA, 3067 bp, Homo sapiens
  modified_base (22)..(28): a, c, g, t, unknown, or other
  modified_base (696)..(697): a, c, g, t, unknown, or other
  modified_base (699)..(701): a, c, g, t, unknown, or other
  modified_base (2920)..(2920): a, c, g, t, unknown, or other
  modified_base (2925)..(2926): a, c, g, t, unknown, or other
ttttttttttttttttttttannnnnnnttctgtgaataggtttattaagaccacctaggagaacctctttggcaactaccacaaattctaggccatttaaaatccaggccaagttcatatttgctctccatgatcaccattacaacaaccacaggtcacacagtattacagaacaaaagcatggtcactttattttacccaaatgcaaatcgtttttcacaaccaagacttttttctttcctacaatgttacaaatgatgtatccaagtccgactgtaatttggagttaaacagggatcatagaaccaaggaattatctctgaagctgctctttgggccactgtgccaccccaacagctctatcctgttgttcttttttttaattaaaaaatcattaaaaaaaaaatggagatggggtcttgctatactgcccaggctgatcttgaactcttgggctcagacgtaccgatatactgatcctcccgcctcagccttccaaagtgttgggattacaagtgtgagccattgcactcagccatctctacacactgtttttcaaggaaaggcagctacacctattccgtctccaaaccaaccctcacctggtgtccagttttcttggaagtctcaatttttctcatgacagcacattacctaatacctaccacattaggatgttaactcataaaaacatnntnnnaaagctttaaaaaacatttatttgtattaagtaagtgcaacagtgcaaagaaacttatgcatttgggcccttgcttccctactgttcacattagtttagtttagaagattaagtataataacagaaggagaacagaagaaatgaatataaatatactcagggtagccaaatcctctaattcactaaaggatgaaccaaagttgttggccagattcacatttatgtgggagcctaaacaaattatgttccctttaactgttctaggcctgtggaaaagggaagtggacaacatttatattacaagacagtaattttattgaaacatctttttttgtctaaaactatgcatggagatattaatctcttgtttataaattaggttaagtctaacatcactatttgaaaccagtgttatttacaaaaatgaacctcttctttgctttattgttggtttacaggaataattttaaaccaacctcaatctatctttaaaaatcttcctgccttcaaatgcccagcaacccttataaggtagggggcagccctttgacagcaacattcatcattcaccaggaatgtagaaccacaagtgaacaacaacaacaacaacaacaagattaaatcattcccaacaattcctatttgcttttccaaagcatgctatgtctaattctgcctttctatgcagacaggtgggagagggagcccatagagtatattaatgttaattaaattaacttcctttaaaagctaacaggatggcttagtgtggatgaggatgaactgctgtggatgacactagcagataatgaagtaaactttaaacccagattagtaacatgtactccagtaactgaccagctcagatagagacttctcatttactctggatcacatgtacaatattttaccttccaattaaatatagtgccaaaatctttcaaaatagatagagaataggcttcttagaaattcaaataaaaatgttaaataataaaaactggtggcctattatagagtttctgacagactccaatatactgggtaccagaaagtaactctatctcagatgctagtaaaaaggtaaattttgtatatacataaaagacaatattacgagactgtagtgtcatttgtcaaaacaagaatatctagaatggaattttcagtaaacacttgggatgaagggcaatcagaatacaagaggaagcaaaatccacataagttaattcctaatttgagaaatcaatagaatcaataaattgataattactgtctccataggtcacgaattccaaagactagttagtagttagtttctaactaaatgattacaggacgttctgatatatgctgtcttcttgtgatcagtttgttctggcaagacttcaacaagcacttgcccttgaaaacagctcagcgggagaacgatcggaggcaatcacttcgttttataaactagccagataataagtcccaagattagaataatcactgacaggacaagcaccaggatacacatcttcttgcgagattttttctgatagtaagcagctcgctgtaactgttcagtggctctttcgacgtgcacctctgagctttccacattggcttctatgctatcaatcagatcaccctggtcatggatcatcatggccaaatctttaaatatctgattgacatccaaaatgtcagcctccagctgccgaattgccgtttctctttctttaataagttccaaatcctgctcagtgatggccacctcatcctcctggctctgcatctggttccactcctcatggctgtcaaatgagaccagctgctcctctctttgcctctcttctgcagaaagacgagatccagctcttgctctggcaatactctccttttccttttcagatacccttctctgcacagcctggaaattgtttaaggctgcagagaagtcattcatgaggcgttccttctgaagtctctgctggcgctgttctgaagtagataagggaaggggcaaggaccctaattctttcagcaattcatttgtttccttggcgagctgatttgtggagtgttgtaactgttgcagattttcctgtagcttgcttgagtcctgcttagttcctagctggctcatcaaattctttatctgagcagtggcttggctgatccgctggatgttgccgctgcacgtctggatgatgctgctgaagtcccggagnctggnnccccgagggccccgggttccggtacatgtctaagggaccgtatgacatgacgaggagctgagacctgctcgctctacaccgctctcctaccggaagcagccgccagccgggacccgcaggctgacggagaaactgggaaga

SEQ ID NO: 349 - DNA, 5649 bp, Homo sapiens
  modified_base (58)..(58): a, c, g, t, unknown, or other
  modified_base (60)..(61): a, c, g, t, unknown, or other
  modified_base (63)..(63): a, c, g, t, unknown, or other
  modified_base (66)..(68): a, c, g, t, unknown, or other
  modified_base (141)..(141): a, c, g, t, unknown, or other
  modified_base (143)..(143): a, c, g, t, unknown, or other
  modified_base (172)..(172): a, c, g, t, unknown, or other
  modified_base (184)..(184): a, c, g, t, unknown, or other
  modified_base (219)..(219): a, c, g, t, unknown, or other
  modified_base (229)..(230): a, c, g, t, unknown, or other
  modified_base (282)..(282): a, c, g, t, unknown, or other
  modified_base (371)..(371): a, c, g, t, unknown, or other
  modified_base (402)..(402): a, c, g, t, unknown, or other
  modified_base (410)..(410): a, c, g, t, unknown, or other
  modified_base (414)..(424): a, c, g, t, unknown, or other
  modified_base (426)..(426): a, c, g, t, unknown, or other
  modified_base (463)..(463): a, c, g, t, unknown, or other
  modified_base (471)..(471): a, c, g, t, unknown, or other
  modified_base (480)..(480): a, c, g, t, unknown, or other
  modified_base (488)..(488): a, c, g, t, unknown, or other
  modified_base (545)..(545): a, c, g, t, unknown, or other
  modified_base (589)..(589): a, c, g, t, unknown, or other
  modified_base (594)..(594): a, c, g, t, unknown, or other
  modified_base (852)..(853): a, c, g, t, unknown, or other
  modified_base (858)..(858): a, c, g, t, unknown, or other
  modified_base (860)..(866): a, c, g, t, unknown, or other
  modified_base (868)..(870): a, c, g, t, unknown, or other
  modified_base (953)..(955): a, c, g, t, unknown, or other
  modified_base (957)..(957): a, c, g, t, unknown, or other
  modified_base (1163)..(1163): a, c, g, t, unknown, or other
  modified_base (1259)..(1259): a, c, g, t, unknown, or other
  modified_base (1288)..(1288): a, c, g, t, unknown, or other
  modified_base (1511)..(1511): a, c, g, t, unknown, or other
  modified_base (1559)..(1561): a, c, g, t, unknown, or other
  modified_base (1587)..(1588): a, c, g, t, unknown, or other
  modified_base (2080)..(2084): a, c, g, t, unknown, or other
  modified_base (2087)..(2089): a, c, g, t, unknown, or other
  modified_base (2101)..(2101): a, c, g, t, unknown, or other
  modified_base (2285)..(2285): a, c, g, t, unknown, or other
  modified_base (2567)..(2567): a, c, g, t, unknown, or other
  modified_base (2569)..(2570): a, c, g, t, unknown, or other
  modified_base (2713)..(2715): a, c, g, t, unknown, or other
  modified_base (3059)..(3059): a, c, g, t, unknown, or other
  modified_base (3061)..(3061): a, c, g, t, unknown, or other
  modified_base (3949)..(3951): a, c, g, t, unknown, or other
  modified_base (3953)..(3953): a, c, g, t, unknown, or other
  modified_base (3970)..(3974): a, c, g, t, unknown, or other
  modified_base (3977)..(3979): a, c, g, t, unknown, or other
  modified_base (4140)..(4140): a, c, g, t, unknown, or other
  modified_base (4393)..(4393): a, c, g, t, unknown, or other
  modified_base (4423)..(4424): a, c, g, t, unknown, or other
  modified_base (4430)..(4430): a, c, g, t, unknown, or other
  modified_base (4505)..(4505): a, c, g, t, unknown, or other
  modified_base (4512)..(4519): a, c, g, t, unknown, or other
  modified_base (4521)..(4521): a, c, g, t, unknown, or other
  modified_base (4523)..(4524): a, c, g, t, unknown, or other
  modified_base (4526)..(4527): a, c, g, t, unknown, or other
  modified_base (4530)..(4530): a, c, g, t, unknown, or other
  modified_base (4532)..(4533): a, c, g, t, unknown, or other
  modified_base (4535)..(4535): a, c, g, t, unknown, or other
  modified_base (4629)..(4629): a, c, g, t, unknown, or other
  modified_base (4796)..(4796): a, c, g, t, unknown, or other
  modified_base (5498)..(5498): a, c, g, t, unknown, or other
  modified_base (5523)..(5531): a, c, g, t, unknown, or other
gtcgactcggtcatgtgtctcatgtatgaagccactcccatcccagaggctaagctgncnncngtnnncgtgaggaaggagcggaagcgacacaaaacagacccctcagctgcaggcaggaagaagaagcagcgtcacggngnaggcggtcgtccctcctcggtccctgttntgaccgcgcaancaccaggacttctgaaaattcgcagagagggcaangagcagaagnngaatattctgctgaagcagcaggtgccattcgccaagcccctgccaactttngccaaacccacagctgagcctggtcaagacaaccccgagtggctcatcagtgaggactgggcgctgctgcaggctgtaaagcagttacnggagctgcctttgaacctcacaatcgtgtcnacctgctncacnnnnnnnnnnngngatcttgtcagtgacgttgttaactcctgtagccgantctaccgntcttccaanacagtgcnggaatcgctacgagaatgtcatcattccacgagaggaggggaagagtaaaaacaacngtcctctccgtacgagccagatctatgcccaggatgagaatgcnacacncacccagctgtacacgagccactttgacttaatgaaaatgactgctggcaagaggagtcccccaatcaaacctctgcttggcatgaatccctttcagaagaaccccaagcacgcgtctgtgttggcagaaagtggaatcaactatgacaagccgctgcctcccatccaggtggcatctctccgtgcagagcgaatcgcaaaagagaaaaaggctctggctgatcagcagaaggcacagcagccggccgtggcccagcnnccccngnnnnnnncnnngcccccaccacccccgcagcagccaccgccaccgctgccacaaccacaggcagcgggcagccagccgccagcagggccaccannngnccagccccaaccccagccacagccccagacccagccacagcctgtgcaggccccagcgaaggcgcagcccgcaatcacgacggggggcagtgcagccgtactggcaggaaccattaaaacatcagttactgggacgagcatgcccactggtgccgtgagtggaaatgtgatcgtgaacaccatcgcaggggtcccagctgccaccnttccagtccatcaacaagcgcctggcgtcgccagtggctcctggggccttgactacgccgggaggctctgctcccgcccaggtggtgcacacccancccccgccacgggcagtcggctccccagncacggcgacccctgacctggtgtccatggcaacgactcagggtgttcgagcggtcacttctgtgacagcctcggccgtggtcactaccaacctgaccccagtgcagaccccggcacggtctttggtgccccaagtgtcccaagccacaggagttcagctccctggaaaaaccatcacacctgcacatttccagcttctcaggcagcagcagcagcagcagcancaacagcagcagcagcagcagcagcagcagcagcagcagcagcagcannnacagcagcagcagcaacagacgacgnngacctctcaggtgcaagttccacagatccagggccaggcccagtccccagcacagatcaaagctgtgggcaagctgacgccggaacacctcatcaaaatgcagaagcagaaactgcagatgcccccgcagcccccaccgccacaggcccagtctgcgcccccgcagccagcagcccaagtgcaagtgcagacctcgcagccgccgcagcagcagagcccccagctcacgacggtcacggccccaaggcctggtgccctgctgacgggcaccaccgtggccaacctccaggtggcccggctcacccgggttcccacttctcaactgcagtcgcaagggcagatgcagacccaggcaccccagccagcccaggtgcccttgccgaagcctccggtggtgtccgtcccggcagctgtggtctcctcaccgggagtcaccaccctgcccatgaacgtcgcggggatcagcgtggcgatcggtcagccacagaaggnnnnnggnnngaccgtggtggncccagcccgtgcacatgcagcagctgctgaagctgaagcagcaggccgtccagcagcagaaggccatccagccccaggctgcacagggcccggcagccgtccagcagaagatcaccgcacagcagatcaccacccctggcgcgcagcagaaggttgcctacgccgcgcagccggcccttaagancccagtttcttaccacacccatctcccaggcccagaaactggccggggcccagcaagtgcagacccagatccaggttgcaaaacttcctcaagttgttcaacagcaaacacccgtggccagcatccagcaagttgcctctgcttcccagcaggcttctccacagactgtggcgctcacgcaggcgacggcggccgggcagcaggtgcagatgatccctgcagtgaccgcgactgcccaggtggttcagcagaaactcattcagcagcaggtggtgaccacgncnncggccccgctccagactccaggcgctcccaacccagcccaggtgcccgccagctccgacagcccaagccagcagcccaagttacagatgagggtccctgctgtcaggctaaagacacctactaagcctccgtgccagtagtcnnngcagcagggctgcctctcatctaaagcaaaactaccttcctcacagaaaacgctttattagtgaaccttgggaccatgtcacgcaagagattcagcactgggaaagatataattgaaacaaaatagtgtaatcattttattaaaatgcatcccacactgcaggacaaatggtccttatggagtgccgcgttctctgtactacgtggctcatggaaaaagtgacaacatggcttcctctaaatcatttcacctttcagtccccacccgcacccgtcccctagagccatagtactgtgttctgaaagccatttagaatttctttgtgagcatgtagtgctttgcancnccacagaagccgtctgccgtgtgtgaggagcatacaatggactttctaaagataaggcgtgggcttccacagtgtctgccagagtttagttctttataccttactgaaaaatgcctcgtggtcttcgcagaggggaaggcctgtctaaagtcaatcatccgagatgggttttccattccaaagaaaggcaatatggttccttccttccctcctaaaatatgacttaacttttaagagaaatgttctgacacccacctaaacacacaaggcacgttcctggcctgtgttcaagggaaatgatcagtcattgcattgttattccaaagagcagccaacagtggcctcccccaggccctaccctgcaatgggattcgctttcatttaatggaaacttctgggactgatgcccaactcagtgcactcaagacgcatctccagttttcgggggaagctggtatttgacatagtgtgttaaacagctcctgagaacctttgggacactctgccatggctggcgtgaggcccagaggaccacgcagaggcaatggtagtacagatgtcacagctgagggtacgatgaggcctgggctcagtgagccaggacgaatgtgacagacaccccttgctgccacagtcagccctttgacgaaggtgggctggtgattctggaagtattggctatagcggtgggcccagtcaactcttccttgtggacttacgacagcagattttctctaggataagcttgtgtggttctgccagtgaagcagagaaccacctgtgctgttgtggaaggcgtgccgttgagggggaaaacgaagcccagtatttgctactgtttttcctttttttactatgacaggaaaataaatgcaattttagtggaannnanaaaaaaaaaaaaaaaannnnnaannnttcaccaaagcaaaaaggtccatatccaatagtatcctttgtgctgtggcttgattttggcctattttacattatttggtccaggaaattaggttatattaggttttttgtatactaaaaatcagttatggcacaataaagattttctgtttttaaattgnatttcatctgcttcctccccattctctcactttaagtgacattgaggaaggtattctgtcccacaggtttctgtggacagcgatacagcaggagtcagtgaaatcaactggggagctcacttgagctcttgataagaaatgtggagaaaagtaaaaaccaagctttgaagaaacagaagaaattaatcttttagttagttgaacataccaaagcagaggactggaatctgtttgttctaaccaacccgttctncctggcttggcacgtgccgtgagagcgcannttgccnggagggagggccgctgtgtgcgcctcacatctggctcccagtggaaacttttactcctcctcatccgcagatgtnatagaannnnnnnntntnngnnttntnncnttgtcatttgttttaatttgtgtgccctgttcattttttttgtctttcccaaatcttggtagtctccttatagttgaagataaaatgttgagtncacttattttagaatatcctagacataactgtctaagtaaaagcgctctattaatctaaaacactacaagagaatttaacaccatctctcaaatgcttttttggagagcttaatgggattctgaatatttgcaatgtggagtttccgccccgatctcacgtcagtgngggtctcctgtctctcaagtgtgtttcctttggctgttccctaatacaaaacacggacatatttttactcgtagcactcaatttagtaacttctagatgctaccgttgacctgagttaaattcatttagtcgtgtacgtaaaaactctccttttagtgtgttattttcttggccttcccttttaaaggttaaagtttctaacctaagaattaagtacgcgttcaggaagctgttgtctaggccttccccttgtgaatctgggttcattccaatacggcaagtaagagttggaaactttgagaacacagactataaaggcagcagcccgaacactgtcagactctaattggcgaccctgggaaacagttgccctgctattctttaaagaaagacgtttattctgatgataaaaacagttagccagactgtttttaaagcacctggcgggaagcagaaggttggatccaagcccttgttcagatttggtgcctgataagacaggggtttctctttttgtgacctttattattattattttgttaactgttgtaaccagttagctgttgtgttttaagatagaaaggaacaagactaaaattgtaaatactttgtaaacatcagcatttgtacttgaatagtaggattttaaagggcattgatagcataccaaacaaaaggcaaaataaagtgacctttttatanaaaaaaaaaaaaaaaaaaaaaaaannnnnnnnncggtccccaattccccctatagtgagtcgtattacaattaactgggccggcgttttttacaaccgttcgtgacttgggaaaaaacccctggggggttaccccaaacctttaaattcgc

SEQ ID NO: 350 - DNA, 5658 bp, Homo sapiens
  modified_base (120)..(120): a, c, g, t, unknown, or other
  modified_base (179)..(179): a, c, g, t, unknown, or other
  modified_base (666)..(666): a, c, g, t, unknown, or other
  modified_base (723)..(723): a, c, g, t, unknown, or other
  modified_base (1451)..(1451): a, c, g, t, unknown, or other
  modified_base (1453)..(1470): a, c, g, t, unknown, or other
  modified_base (1472)..(1475): a, c, g, t, unknown, or other
  modified_base (1477)..(1477): a, c, g, t, unknown, or other
  modified_base (1479)..(1480): a, c, g, t, unknown, or other
  modified_base (1482)..(1482): a, c, g, t, unknown, or other
  modified_base (1485)..(1485): a, c, g, t, unknown, or other
  modified_base (1487)..(1487): a, c, g, t, unknown, or other
  modified_base (1489)..(1489): a, c, g, t, unknown, or other
  modified_base (1491)..(1491): a, c, g, t, unknown, or other
  modified_base (1493)..(1497): a, c, g, t, unknown, or other
  modified_base (1499)..(1500): a, c, g, t, unknown, or other
  modified_base (2361)..(2361): a, c, g, t, unknown, or other
  modified_base (2638)..(2638): a, c, g, t, unknown, or other
  modified_base (2680)..(2680): a, c, g, t, unknown, or other
  modified_base (2685)..(2685): a, c, g, t, unknown, or other
  modified_base (2696)..(2696): a, c, g, t, unknown, or other
  modified_base (2708)..(2708): a, c, g, t, unknown, or other
  modified_base (2710)..(2710): a, c, g, t, unknown, or other
  modified_base (2726)..(2726): a, c, g, t, unknown, or other
  modified_base (3083)..(3084): a, c, g, t, unknown, or other
  modified_base (3549)..(3550): a, c, g, t, unknown, or other
  modified_base (4425)..(4425): a, c, g, t, unknown, or other
  modified_base (4929)..(4931): a, c, g, t, unknown, or other
  modified_base (5033)..(5033): a, c, g, t, unknown, or other
  modified_base (5118)..(5118): a, c, g, t, unknown, or other
  modified_base (5643)..(5644): a, c, g, t, unknown, or other
  modified_base (5646)..(5648): a, c, g, t, unknown, or other
cgagacgctgaagagaaccagggctaccagaagcagcaacagcagcgagagtatcgcttccgccatttccatgaaaatttttattttgatgaatccttttttcacttcccttttaattcntgaacggcgggactcaattgacgaaaagtatttattgcacttttcacattatgtgaatnaagtggttccagatagcttcaagaaaccctacctcatcaagatcacctccgattggtgctttagctgcattcatatcgagcctgtgtggaaagaagtcattcaagaactggaagaattgggtgtaggaattggcgtggtccatgctgggtatgagagacgcctggcccatcacctaggggcacacagcacgccctctatcctaggaatcattaacgggaaaatctccttcttccacaatgcagttgtccgtgaaaatctgcgacaatttgtagaaagtcttcttccagggaacttggtggagaaagttacaaataaaaattacgtcagattcctctctggctggcagcaagagaataagcctcatgtccttctgtttgaccaaacgcccattgtgccactgttatacaagttgactgcctttgcatacaaagattatttatcatttggatatgtatatgtgggtttgagagggacggaagagatganaaggcggtacaacatcaatatctacgcccctaccctcttggtctttaaagaacatanaaacaggcctgccgatgttatccaggcccgaggtatgaagaagcaaatcattgacgacttcatcacccgaaacaaatatctattggcagccaggctcaccagccagaagttgttccatgaactctgccctgtgaaacggtcgcatcgacagaggaagtactgtgtggttttattgactgctgagactaccaagttgagcaaaccctttgaggctttcctgtcctttgccctggcaaacactcaagacacagtgagatttgtgcatgtctacagcaatcggcagcaggagtttgccgacaccttactaccagacagtgaggcgtttcaagggaaatcagcggtgtctattttagaaaggcgcaacacagcaggaagggtggtgtataaaaccctggaagacccttggattgggagtgagagtgacaaatttatcctcttgggctatctcgaccagctgcgtaaagatccagctcttctgtcctctgaagcagtgcttcctgacctgaccgatgaacttgcccctgtttttctccttcgatggttctactctgcttctgactacatctcagactgctgggatagcatttttcacaacaactggagggaaatgatgcccctgctgtccctgatcttctctgccctcttcatcctcttcggcactgtcatcgttcaggctttcagcgactctaatgatgagcgagagtcaagccctccagaaaaagaggaancnnnnnnnnnnnnnnnnnnannnnancnnanctncncnanannnnncnncagcaagattcctaaaaaaggctttgtggaggtaactgaactcacagatgtaacatacaccagtaacttggtacgtctgaggccaggccacatgaatgtggtcctcatcctgtcgaattctaccaagaccagcctactacagaaatttgctttggaggtctacacatttactgggagcagctgcctacacttctccttcctgagtctagataaacacagagaatggctagaatacttactagaatttgctcaagatgcagctccaatcccaaaccaatatgataagcatttcatggagcgtgactacactggttatgtactggctctgaatggccacaagaaatacttctgcctcttcaagccccaaaagacagtcgaagaggaggaagccatagggtcgtgcagtgatgttgactcttccctctacctgggtgaatctcgagggaaaccttcctgtggccttggatccaggcccatcaaaggaaagttgagcaagctctctttatggatggaacgcctgctggagggctccttacagaggttttatatcccatcatggcctgaactagactgagaggattttccaaagagatttgaactcttcagactttttaacatgcccctgtgaacaggtattttcaggactcaaactaccacaatgaacagagtatagattttagattgctcttctagaaccatggctagaagaatctttcctttgtcctgttctaacctaggaatgaaaaacaccaccagtttgaatcgcctagatgaaaatcttttcctctgggtgttatttttccccactgaatgccacaccattgaaaatagactgctcatcccctcttcctttcttgtccntgtcccatgctcaccccaccctcctgtcctgtgtcttggagaagcacagggctccaccctgcaagcggcatctggcggaccctcatgagcctgtcgtgcaggccaggtcattggccccttccccaatcccggccctgctgtgctgctgccatggcgcatgctcctaactctgaacaacccacggcagcttctagccccgcatctggaaaaaggcccctttccaagcaatctcacgtttactggttgttctgggagtaagtggctaaatgtatatttngggggtatcccccaacaacagtttgttggccacaggttgaanagganaggaataaacnggagttctgcangngagttctcaagaaaanggaaagggaggctgagcagtggctgaagcgatgcagccttgagacacgctgtgagcatcccatccgccgccccagcgctgctggtagccaggggaggggtctgcacagcgagaagtactgtgatgactttgagccgttgacatgtatgtcttcagatgcctttctgcctctgtcgattttagggtatggatattaggagccataacttgtaatcttgttctctgaacgtagagataagctgctataaagccagtagatgttaaactgaagagaaattattcccacctgctatgagtcaggcttaaggaatctcttcaatagtgtctctttagtaaaataccaaacatgtctttgtannaaggaacttaaaatttctcaacaattgtattttgaacactgttaccctaaaagtgctgtctcttcaagtcatcttttgcaggaagtgagccaagatttgttctagactcccattttgcaaaaggcttactttccacttctgggctgtattttgatgtctcatcttcattgttttcactcttaacttagagctgcttcaccagtattggggtcagactggccatcagcacctgagcgtgctgagctccaggtatagtggaccccagggtgcctcataccagccagttagagagcataccttttatttttcagggcagaatgaccagtggttctgagtttgagtttggacagcttcaaagagtggtccgttcaaatgtcaaagcaaggtgcctttggtggctttgtgaagggtgaaaatcagtgatgggacatttactaagtatttctttttttttttttttttttnnagttgttgagacagagtttcactcttgttgcccaggctggagtgaaatggtgcgatctcggttcaccgcaacctccacatcccaggttcaagtgattctcctgcctcagcctcctgagtagctaggattacaggcatgtgccaccatgtaattagcccggctaattttgtatttttagtagagacgggatttctccatgttgatcaggctggtcatgaactcctgacctcaggtgatctgcctgcctcagcctcccaaagtgctgctgggattacaggcgtgagccaccactcccggctaagttagtatttctttaatcttaatgctttaaactaagccacttggatcctgaataatttaaatcttgagctacattggtaagtaataaattatttaaggccaggaattcctgtagttttcatggagtctgtagctttattaaaaaataaatcactgccaggcttcattcttccatatgatcctctaaaaatggacacttcctctgaatgctgtatctcatggcacctggtccaactagaaatggtcaaggaattcatttggctccttgatacatcagtcctcaatattactttctaggtattttatggccagattgcttatatgagtggtcttttggtttggtagtaggtttttatttttaatttctgtactaatgaaattcctgactttaatttctgaaaaccaaaaactctccaagtgtatttatttatattttttttaatagagacgaggtcttgctatgttgcccaggctggtcccaaactcctggcctcaagcagtccttccaccttggcctcccaaagtgctgggattatcaatatgagccaccatgccagatttgttcatttttaaanatttttatctcttcaagtcatcttttgatcttttaaaaagcaccttcaaacagctgcaccttccatttgcactaggaaatgaaggtagtgatgggattggcaatgttcctggcagatgtttcagcccaaaagctcttctacagaccggtttagagctggtgccctatgagaatattagggagcttttattttaaattgaactttacccttgtccatgcaaggcattcctcctgaatgcatccatgaatttgtttacttttgcgtcaaacatatgagccattgtcatgctcagcctgtgccaccattgctctgtctgatgtatgtaatcatacaagacctgattttggttctaacacagtggtctttgactatcaacattgatgtttttagagatgggttcttctggttgatacagactatgcattgcgtttagcagatggggtaaaactggcctaaaacaagtctttgcagaatacatgccaatttccaaaaaaaaaaaaaaannntttgttgctcaggtgttgcacaatttttatctaacactgaggctatcagctccaactaaacaacatttcagtgggtgaggctgccctaacttccattagggnccatggtctcactgccatcacttattagccatgagaatttggttgtagttttcaggtaggttggtttcttcctcatttgcagctngttgatacttgttcctttttatttattaacatcccaatcaatttgcagctgccatcattacataaatatttttctgttataaaaagaagtgtgatctgtttttttagtgatttcctttgtttgggaatagagattggaagcacatactcagacctgttttgttaactagaattctttaaaagctgatgccaaacatctttacagaggaactgtagttcacatccacctgtctgacattgtcccctaaaaacaagtgcagtgtggcagctgctgaatctgtctgttcagtttgtcaaggaggataattatgcttgggagagatctgaaaagaaggtgaatattttgcacttttgatactcttaggaacaaataacttatttggcaaattgtttcttttttatgttttgggtgttgtttttgttttttgactttttttgtattgtgaacaggcactgaagctgatgttattttaagattacagaatggaaaaagaaataaactattttaatgtctgataaaaaaaannannnaaaaaaaaaa

SEQ ID NO: 351 - DNA, 3761 bp, Homo sapiens
  modified_base (708)..(708): a, c, g, t, unknown, or other
  modified_base (712)..(712): a, c, g, t, unknown, or other
  modified_base (720)..(720): a, c, g, t, unknown, or other
  modified_base (1887)..(1887): a, c, g, t, unknown, or other
  modified_base (1889)..(1891): a, c, g, t, unknown, or other
  modified_base (1893)..(1896): a, c, g, t, unknown, or other
  modified_base (1900)..(1903): a, c, g, t, unknown, or other
  modified_base (1905)..(1913): a, c, g, t, unknown, or other
  modified_base (1979)..(1979): a, c, g, t, unknown, or other
  modified_base (2048)..(2048): a, c, g, t, unknown, or other
  modified_base (2109)..(2109): a, c, g, t, unknown, or other
  modified_base (2160)..(2160): a, c, g, t, unknown, or other
  modified_base (2291)..(2291): a, c, g, t, unknown, or other
  modified_base (2294)..(2294): a, c, g, t, unknown, or other
  modified_base (2337)..(2337): a, c, g, t, unknown, or other
  modified_base (2388)..(2388): a, c, g, t, unknown, or other
gcacgagggatagcttttacatcatagagtctggcgaagtgagcatcttgattagaagcaggactaaatcaaacaaggatggtgggaaccaggaggtcgagattgcccgctgccataaggggcagtacttggagagcttgccctggtcaccaacaaacccagagctgcctcagcttatgcagttggagatgtcaaatgcttagttatggatgtacaagcattcgagaggcttctggggccctgcatggacatcatgaagaggaacatctcacactatgaggaacagctggtgaagatgttggctccagcgtggatctgggcaacctcgggcagtaggtgtgccacaccccagagccttcttagtgtgacaccaaaaccttctggtcagccacagaacacatacagaaaacagacatgacagaactgttcctgccgttgccgccactgctgccattgctgtggttatgggcatttagaaaacttgaaagtcagcactaaaggatgggcagaggttcaacccacacctccactttgcttctgaaggcccattcattagaccacttgtaaagattactccaacccagtttttatatcttgggttcaaaacggcatgtctctccaacaatttaagtgcctgatacaaagtccaaagtataaacatggcttcccctttttttcccctttctttccttttggcctgtgccgtanctcntgtgcttntggaagttaccacagggtctgcagaaacctgttgtataactgtagacactctctaatggttctcaaaggaggaaatgtagccttcagtctcctcatttgtcctttgaggaagtccacatttgttcacagttgcaacctttggttttacagtgggaaatggtggtggatgatatggacatatgtagcccagtggcattgtacttctgctgacagctgcacacattacagctgtctccaaacccacagtgatgcttagggaaagaccctgctcaggacccagcaggtcagcaccccagagcagactgataggtccgtgggacccatgttagagcagaaaatttgggctcagcacattttactgttagtagagagccaggaaacgttttctgggttggggattttgtgggattttttaatttttttagtaggttttgtttaacctctgtgcagtttgtatgaatgaattgctatacatttataaggagccagggtctggagggttgctatcactttgtccagcccaaataccttcctgggcaactcctaccatttgtttgcagttgcctctactagctgatggcagtatgctggaaagaggttgtactataaagagagttctttccttctactccagagttgttgtgtagctttgccattgaaccgatcaatttttaaactctttaaagaagcagcagctatttttttgaaattaaagaaaattctcaggccaggctcaatggctcatgcctataattgtagtgctttgggaggctgagctgggaggatcgcttaagaccagcctaggcaacagagtgagatcctgtctctacaaaaacaaaaattttttttttgttttctttttgagacggagtttcgctcttgttgcccaggctggagtgcagtggtgcggtcttggctcaccgcaacctccgcctcccagattaaagtgattctcctgcctcagcctcctgagtagctgggattacaggcatgcgccaccatgccgggcgaattttgtatttttaatagagacagggtttctctgtgttggtcaggctggtctcaaactcccaacctcaggtgatccgcccacctcagcctctcagagtgctgggattacagatgtgagccactgcacctggcaaaaaaaaattttttttttaattngnnngnnnnggtnnnncnnnnnnnnngtcccaaatacttaggaggctgaggtggaaggatcacttgagcccaggaggtcaaggcaacagtgngctgtgatcatgccactgcactccagtctgggtgacacagtgagaccctgtctcttaaaaaaaaaaaangaaagaaaaaaaattattctttaggtaatttcacttggacatattcatgtatatggagttngtcagctgactcaggcatttaccctaaagatcaaatctgttttcaaaaatnggcattggccaggcacggtgacccacacctgtaatcccagcactttgggaggccgaggcgggcggatcacgaggtcaggggttcaagaccagcctggccaacatagtgaaaccccgtctctactaaaaatncanaaaattagctgggcatggtggtgggcgcctgtaatcccagctncttgagaggctcaggcaggagaatcgcttgaacctgggagtggaggttgcngtgagccgagattgcaccattgtattccaccccgggtgacagtgcaagactccatctcaaaaaaaaaaaaaaaatttggcatcatttacaatttcatagaattactgtgaaggcctttctagttgagatgttggggtatttgggattctaattgttaaccccagaagaaggtaatttagcttgtatttatttaaaacccatttagccttttacttatatctggtagaattccagtgatcatcctaataaggtatatttcagaataatttttttttccttcagaataacttagaatcagatgctataagggctcctaggagcagtgtgaaatttccgtaaagataaatttgaatgttgtaaccaagtttatattaaaccaagaggccatttccaatatgattttttgtttctttttaacttgttaagtccctaagagattacatgctagggcttgagtcatttctattgtagataatgatggcccacacagtcaccttcaactatccacataagctaggctttccgcttttgccacggacagtgtgaccaagatatttccagagtaaataacccaccacaaccttggtaattcctcttttcttcttaagctccaggaagcgaaagcagaaggactcttttcagactgccctctgtagcctacattgcagctttccaaaacaggcagctagcactgggaaagcccatgtggtgaccccatatttttctgaggttcttcttttccatggtgttactttattatcagaaagtaaattcagaaaacaggtcttgcccttagcagacaagaaccacaccagtttcttgtaaaggtaacggatacattgggattcaggagtgacacagaggtccagccccagaacttgtaaggattttgtttgaacactgagcagatgcctcctccctgccacccatcacactagttagggctggccatgaattctatgccagagtcactcctgcagtctgctagggatgggccttcttatcccactctcgcacacatcccagtctagtctttgccttcacagagtcctccttgacacccctgacttaatgatagttgctgttttggagtagaattgatcaggtttaagtcatcctgctcaggttgggcatagtggctcatgcctgtaatctcagcactttgggaagccaaagtgggaggattgcttgagcccaggagttccaaaccatcctgggcaacagagggagaccctgtctctaccaagaaaaaaaaaaaaaaagtcgacgcggccgcgaatttagtagtagtaggcggccgctctagaggatccaagcttacgtacgcgtgcatgcgacgtcatagctcttctatagtgtcacctaaattcaat

SEQ ID NO: 352 - DNA, 1689 bp, Homo sapiens
  modified_base (15)..(15): a, c, g, t, unknown, or other
  modified_base (17)..(18): a, c, g, t, unknown, or other
  modified_base (20)..(22): a, c, g, t, unknown, or other
  modified_base (25)..(25): a, c, g, t, unknown, or other
  modified_base (1137)..(1137): a, c, g, t, unknown, or other
  modified_base (1415)..(1415): a, c, g, t, unknown, or other
  modified_base (1471)..(1471): a, c, g, t, unknown, or other
  modified_base (1526)..(1526): a, c, g, t, unknown, or other
  modified_base (1533)..(1533): a, c, g, t, unknown, or other
  modified_base (1536)..(1536): a, c, g, t, unknown, or other
  modified_base (1542)..(1542): a, c, g, t, unknown, or other
  modified_base (1546)..(1546): a, c, g, t, unknown, or other
  modified_base (1558)..(1558): a, c, g, t, unknown, or other
  modified_base (1561)..(1562): a, c, g, t, unknown, or other
  modified_base (1595)..(1595): a, c, g, t, unknown, or other
gctgacgcctactantnntnnnttntttttttttttcagagttttagatattatttattttaaactaaagcaaataacaagttaagtgaaatttgcagttttcactttgcattgtctatttaaaaggcctaggtattggagctgaaatgctgaagaggctaagtcaggtatgtattacaattagtattgatattctatacattaaccttttcttaataaatattcacagggcataaattaaatcattaatctcaccatttgaacataaccccaacatatacttcaaatttctacccaaattaaactggattttcaaatcagatgatcatatacagtatatgaattatagtcaattaaaattgatttatatataatccacaaccacactatacaccctttttgctatcaagggaaagtaagaaggagggagattagaaagcatttttattcaaaaacacaggctcacagtatgaatattacaagactataaaagcaagatcttcttgtattttggaaacatatgagaacatgtgttcttttaggtacaccttttctgtatgataaaggctttgcaaatcagttttgagattttaaagagggctttaaagctcagaacagtgagacttttttctttttacagctatagaaaagttcaaaaggtaactactatatttggaagtattattcacacatagtgtcttgcatagagtagaccttcaataaaatatatgtgttaacgaagattatactttcaaatgaaagtaatatttgcttgtttgtttttaaacagatagccatcacaactcaatgtaactgcatgcactttcttgtcgtcatttggaaccaggcttctatcaactactatactagtcgaggggctttagacctttcctctgaggagggctggcatctcttcaggtttaacagagaagaactcctggacatggcatgggaagaatgaaagaggctttgtaacaactcatcccaacacagcctccaacatttgactgtcacctgagtctaacagcagtttgactttgttgtacaatacagcaagtgatcatcacattcttgtttgagcagatcttttattttgaaacagattttgtagctctagtcaactttccattatccaanccaatattctaacggctagtagcagtagtgataatccaaaagagcagataatttaaaagtcacttatacttagctttgcgctattttttacctatcatatttcatcaaaattaaggtgcttttcacaatttgacatatctgatgtcgggataaatgtaatgatcaactggcagcattttttgtttgtttgtttttagaggcaggatcttgctatgttgctcaggctggtctcaaacttttggcctcaagcaatcctcccacttcagcctcccagacanaagcaactctgctcagcctttttttttaaattaaaggtatatgatatgccttaganttgatgaaatatgggtgtttgaatatattcagatctgaggtttaaaaaaattcanttcaaanacnggaganaaantctgaagagccnacnnatgaaaaactagcaagtaaactgcttccctacnttgagcagcttaagtaccactgcctccttgacatcatcccagtactacattctatctctgaacatccatagctctttggttgtacttatcttag

SEQ ID NO: 353 - DNA, 976 bp, Homo sapiens
  modified_base (210)..(243): a, c, g, t, unknown, or other
  modified_base (321)..(321): a, c, g, t, unknown, or other
  modified_base (442)..(442): a, c, g, t, unknown, or other
  modified_base (475)..(475): a, c, g, t, unknown, or other
  modified_base (507)..(507): a, c, g, t, unknown, or other
tggattttcagcatgcctctgaagatgcaaggaagaccataaaccagtgggtcaaaggacagacagaaggaaaaattccggaactgttggcttcgggcatggttgataacatgaccaaacttgtgctagtaaatgccatctatttcaagggaaactggaaggataaattcatgaaagaagccacgacgaatgcaccattcagattgaatnnnnnnnnnnnnnnnnnnnnnnnnnnnnnnnnnnaagaaaatttcactgccgaccatccattccttttctttattcggcataattcctcaggtagcatcctattcttggggnagattttcttccccttagaagaaagagactgtagcaatacaaaaatcaagcttagtgctttattacctgagtttttaatagagccaatatgtcttatatctttaccaataaaaccactgtncagaaacaagtctttcattttctttgtaagttnggctctgttggctgtttacacccatgaatttnggcatgggtatctatttttcttttttacattgaaaaaaatccagtggttgcttttgaatgcatcaagtaaagaagaagaaaagaatacatccgatgcgtagattcttgaccatgtagtaatctataaaattgctatatcctcctgatagccatgggaaaacatgataagatggtcatttattttgcagttagaattttggaagccacaaaatagacagacaccctgactgttgaagggaggtttaaaaacagatattcaattgaaatgtaagagagcaccccaattgagagcccaggttacgaagacaagcttgcctcgcctgacttttctgtcccttgttctgcaggattagtattctgttacagacctctagtttttagactcttcaattaaagggccaatggttataacctgcaaaaaaaaaaaaaaaaaaaaaaaaaaaaaaaaaaaaaaaaaagggcggccgct

SEQ ID NO: 354 - DNA, 470 bp, Homo sapiens
  modified_base (123)..(123): a, c, g, t, unknown, or other
  modified_base (127)..(127): a, c, g, t, unknown, or other
  modified_base (447)..(447): a, c, g, t, unknown, or other
tttttttttttttttttttttttcacaagcacgtgcactttattgaatgacactgtagacaggtgtgtgggtataaactgctgtatctaggggcaggaccaagggggcaggggcaacagcccnagcngtgcagggccagcattgcacagtggagtgcaaaggttgcaggctatgggcggctactagtaaccccgtttttcctgtattatctgtaacataatatggtagactgtcacagagccgaataccagtaacaggatgaatccaatggtcatgaggatgcccagaatcagggcccagatgttcaggcacttggcggtggaggcataggcctgggccccggtcacgtcgccaaccatcttcctgtccctagacttcacggagtaggcgaatgctatgaagcccagacagcaccagttcaagaagagggtgttgaacagggaccanacgacatggtcgggcacggaggt

SEQ ID NO: 355 - DNA, 345 bp, Homo sapiens
  modified_base (23)..(24): a, c, g, t, unknown, or other
  modified_base (344)..(344): a, c, g, t, unknown, or other
ttttttttttttttttttttttnnttaacattccaaacatgtataaccaattaacatggcctagggttttctttttattggtattcacttcagtaacttgaatccacagatataagcagtatataaccagaaagttacaagtaaacacaaattatacatgcaaatttctgttcacaaaggtcacatgtgcaggtacatgaattagaagcgtgcatctaggattatggccaaactgttttaaaaatgcagaaatgtaaaattacatcttgaaaatatgaagagatggtctacacacttcaaaaatcaaatgttgcttataccagagatgtatgacaatcacgggnt

SEQ ID NO: 356 - DNA, 1896 bp, Homo sapiens
  modified_base (79)..(84): a, c, g, t, unknown, or other
  modified_base (86)..(88): a, c, g, t, unknown, or other
  modified_base (90)..(92): a, c, g, t, unknown, or other
  modified_base (94)..(94): a, c, g, t, unknown, or other
  modified_base (96)..(97): a, c, g, t, unknown, or other
  modified_base (100)..(104): a, c, g, t, unknown, or other
  modified_base (106)..(109): a, c, g, t, unknown, or other
  modified_base (111)..(112): a, c, g, t, unknown, or other
  modified_base (114)..(114): a, c, g, t, unknown, or other
  modified_base (116)..(121): a, c, g, t, unknown, or other
  modified_base (123)..(125): a, c, g, t, unknown, or other
  modified_base (210)..(210): a, c, g, t, unknown, or other
  modified_base (259)..(259): a, c, g, t, unknown, or other
  modified_base (270)..(270): a, c, g, t, unknown, or other
  modified_base (281)..(281): a, c, g, t, unknown, or other
  modified_base (285)..(285): a, c, g, t, unknown, or other
  modified_base (370)..(372): a, c, g, t, unknown, or other
  modified_base (374)..(374): a, c, g, t, unknown, or other
  modified_base (376)..(378): a, c, g, t, unknown, or other
cgtggcttgatcaccccctccccaataaagctaaaactcacctgagttgtagcttgagtgaagtggcgtgatcttggcnnnnnncnnncnnngncnntgnnnnnannnnanncncnnnnnntnnngtgctctatgcccaggtctctgtggctgggctgctccagcctggcggacagcatgccttcgctgcgatgcctgtataacccaggnactggcgcactcacagctttccagaattcctcagagagagaagactgtnataatggcganccccctaggangatnataccagagaagaattcacttagacagacatacaacagctgtgccagactctgcttaaaccaagaaacagtatgtttagcaagcnnngntnnnaagactgagaattgtgtggccaaaacaaaacttgccaatggcacttccagtatgattgtgcccaagcaacggaaactctcagcaagctatgaaaaggaaaaggaactgtgtgtcaaatactttgagcagtggtcagagtcagatcaagtggaatttgtggaacatcttatatcccaaatgtgtcattaccaacatgggcacataaactcgtatcttaaacctatgttgcagagagatttcataactgctctgccagctcggggattggatcatatcgctgagaacattctgtcatacctggatgccaaatcactatgtgctgctgaacttgtgtgcaaggaatggtaccgagtgacctctgatggcatgctgtggaagaagcttatcgagagaatggtcaggacagattctctgtggagaggcctggcagaacgaagaggatggggacagtatttattcaaaaacaaacctcctgacgggaatgctcctcccaactctttttatagagcactttatcctaaaattatacaagacattgagacaatagaatctaattggagatgtggaagacatagtttacagagaattcactgccgaagtgaaacaagcaaaggagtttactgtttacagtatgatgatcagaaaatagtaagcggccttcgagacaacacaatcaagatctgggataaaaacacattggaatgcaagcgaattctcacaggccatacaggttcagtcctctgtctccagtatgatgagagagtgatcataacaggatcatcggattccacggtcagagtgtgggatgtaaatacaggtgaaatgctaaacacgttgattcaccattgtgaagcagttctgcacttgcgtttcaataatggcatgatggtgacctgctccaaagatcgttccattgctgtatgggatatggcctccccaactgacattaccctccggagggtgctggtcggacaccgagctgctgtcaatgttgtagactttgatgacaagtacattgtttctgcatctggggatagaactataaaggtatggaacacaagtacttgtgaatttgtaaggaccttaaatggacacaaacgaggcattgcctgtttgcagtacagggacaggctggtagtgagtggctcatctgacaacactatcagattatgggacatagaatgtggtgcatgtttacgagtgttagaaggccatgaggaattggtgcgttgtattcgatttgataacaagaggatagtcagtggggcctatgatggaaaaattaaagtgtgggatcttgtggctgctttggacccccgtgctcctgcagggacactctgtctacggacccttgtggagcattccggaagagtttttcgactacagtttgatgaattccagattgtcagtagttcacatgatgacacaatcctcatctgggacttcctaaatgatccagctgcccaagctgaacccccccgttccccttctcgaacatacacctacatctccagataa

SEQ ID NO: 357 - DNA, 1760 bp, Homo sapiens
aaaacgtttgtatctcaagcaagtgctacaatgcaacagtatgcacagagagataagaaacatgaatattggtttgctgtgccacaagaaaggacagatcacttgtatgccttcttcattcagtggagtccagaaatatatgcagaagatactggcgaatataccagagaacctggatttatagtagtaaaaaagattgaggagtctgaaacaattgaggattctagtaatcaagcagcagccagagaatgggagattactacaagggaagacataaattcaaagcaggttgctacagtgaaagcagacctggagtctgaatcttttcgaccaaacctaagtgatcccagtgaacttttactgccagatcaaattgaaaagcttaccaagcatcttccaccaagaacaattggctatccatggactcttgtttatggtactggaaaacatggcacaagcttgaaaactctttatcgaacaatgacaggtttagacaccccagtgctgatggtgattaaagacagtgatggacaggtttttggtgcgttagcatctgagccactgaaagtgagtgatggcttttatggtactggagagacctttgtttttacattctgtccggagtttgaggtctttaagtggacaggagatgatatgttttttatcaaaggagacatggattcactagctttcggtggtggaggaggagaatttgcgctttggcttgatggagatctctaccatggaagaagccattcttgtaaaacgtttgggaatcgtacactttctaagaaggaagatttctttatccaagatattgaaatctgggcttttgaataaataaaatgctctctgtcttagcaggagaatggcccaaacctgacatggacaagcattgtttggaaagttcaagaagcaatacagtgtaacatgtcacttgtgctttaaaattagtctgtatcaccatttattacagttataattttggagtttatttttcaaatcatgttcttgtcccagagttctttaggttaacactagggactgcgtccatgtactagtataacagcttgggtttgttagaatttgggcaacattttgattataatgacaacttcattttcacatgttactcagttccctaataggatggtgctcttttgttgaacctgtattgatttttttttttttaactatattgattcgtttactagaacagtctaattggggcattgaggaaatgaagactggatacttctgtatctgtgaagttggcacaggtaacatttggacatgttcatcttattcttaggaaggaaaaaatcacttgccaaaataatacatacttcatagaccactgagttctagtttttattcacactacaacattctctttaacgatgttgcaggtattctcaatttccttttaagaaaaatgaaatgtgaggagaattctggttgtaatagatgacagtacatatgatctgcaggtttgggcatatgctttcatcattaaattatctgataaagttacaagtcacaaaggagaatgagaacttaatgattctattggatttaatatattagcaagaaaacatactatttacatatgtgtagcttagtaaggcattaacataagtacaaaaactatgaaacagatgcatatttcctcaacatactgtgtcaggtatactgttttataatttggttgttttagccttattgcacaccaactcccaaaatataggttactcttgttc

SEQ ID NO: 358 - DNA, 1474 bp, Homo sapiens
agacgccgggggcggacgggaggaccggaggaccgaggacagaaagattggtggacaggagcagcggccggtggggagggcgctcggcggcggcctgcggccatggccaccgtgatggcagcgacggcggcggagcgggcggtgctggaggaggagttccgctggctgctgcacgacgaggtgcacgctgtgttgaagcagctgcaggacatcctcaaggaggcctctctgcgcttcactctgccgggctccggcactgaggggcccgccaagcaagagaacttcatcctaggcagctgtggcacagaccaggtgaagggtgtgctgactctgcagggggatgccctcagccaggcggatgtgaacctgaagatgccccggaacaaccagctgctgcacttcgccttccgggaggacaagcagtggaagctgcagcagatccaggatgccagaaaccatgtgagccaagccatttacctgcttaccagccgggaccagagctaccagttcaagacgggcgctgaggtcctcaagctgatggacgcagtgatgctgcagctgaccagagcccgaaaccggctcaccacccccgccaccctcaccctccccgagatcgccgccagcggcctcacgcggatgttcgcccctgccctgccgtccgacctgctggtcaacgtctacatcaacctcaacaagctctgcctcacggtgtaccagctgcatgccctgcagcccaactccaccaagaacttccgcccagctgggggcgcggtgctgcatagccctggggccatgttcgagtggggctctcagcgcctggaggtgagccacgtgcacaaagtggagtgcgtgatcccctggctcaacgacgccctggtctacttcaccgtctccctgcagctctgccagcagctcaaggacaagatctccgtgttctccagctactggagctacagacccttctgatcacagcacccaggagcttgtctccaggaaggcggccccgtcccctactcatacccaccacagagcaccagccagtgccaacgccaggctgctatttatctccctatcccaccccctaccccacctaacacatttgcactgccaggaatggacactggaagtgccaggaggaaggaaggctggtttggtggggtagtggggaggtcagggaggcggggccaagggtgtcccacattcccaacaccgccctctgatcaccatgggaatctttggactcaggacagggccaggtgcagggctctccctcctctccccttcgctgtcccctccccctggagggcatggtgtcggggggtggcactgagctatgagtcccggggatggtgaggaacgccacagacagagccaccctaggagtgagtatagtgctggtgactgtgtttcatagccccagtccagggctgtctaagaaataaagatcatcagactccaaaaaaaaaaaaaaaaa

SEQ ID NO: 359 - DNA, 2058 bp, Homo sapiens
cggtgctagcgacacgggagtggcaaacgcatcctcttgccgttcccggtgtttgggccttgcctgtgacggtgggaaaagaaaatggccttgctgtgctacaaccggggctgcggtcagcgcttcgatcctgagaccaattccgacgatgcttgcacataccacccaggtgttccggtctttcacgatgcattaaagggttggtcttgctgtaagagaagaacaactgatttttctgatttcttaagcattgtaggctgtacaaaaggtagacataatagtgagaagccacctgagccagtcaaacctgaagtcaagactactgagaagaaggagctatgtgaattaaaacccaaatttcaggaacacatcattcaagcccctaagccagtagaagcaataaaaagaccaagcccagatgaaccaatgacaaatttggaattaaaaatatctgcctccctaaaacaagcacttgataaacttaaactgtcatcagggaatgaagaaaataagaaagaagaagacaatgatgaaattaagattgggacctcatgtaagaatggagggtgttcaaagacataccagggtctagagagtctagaagaagtctgtgtatatcattctggagtacctattttccatgaggggatgaaatactggagctgttgtagaagaaaaacttctgattttaatacattcttagcccaagagggctgtacaaaagggaaacacatgtggactaaaaaagatgctgggaaaaaagttgttccatgtagacatgacttgcatcagactggaggtgaagttaccatttcagtatatgctaaaaactcacttccagaacttagccgagtagaagcaaatagcacattgttaaatgtcattattgtatttgaaggagagaaggaatttgatcaaaatgtgaaattatggggtgtgattgatgtaaagcgaagttatgtaactatgactgcaacaaagattgaaatcactatgagaaaagctgaaccgatgcagtgggcaagccttgaactgcctgcagctaaaaagcaggaaaaacaaaaagatgacacaacagattgagtgggagatggaaggaaggctattacattatttccgaatttttaatactgtgtgaagtggtggcttgctgctgtaatcttttgttttgttgttgtgttactgaatgtggcatttcagggttaacattaggttcttaaaagccaaagtcagtttgtctttttgtgcctctcatctttcttttgtgttatgtaagattgattattcatttctccctactggtaggaaccatagttgtgtcctatacttgaagaggctggaaagtagcccataaccataattgcagtatttctttgtatttctctgttaagcaaagaaatattaaggaacattttttttatgtttttgtattattccataattagtaaagcaagatgaaatgtcaaattttaatcagttttttcatggatttgtgttcttacagtacttgaaaatatttaaggaagagatgaagctctgcagttttttctatgtgggatgattacttttttaaggaggattaattctgaggtagtatagtaactaaaggggaatatatgaattgtttaacaaattagaatttgtttacaactacttgaatttttaaattatgtcaaaacttacattacttgccaagcagtatgatgttataggaaacataaataagattacagaggtatcaatttggttaaaattcaccattttataagactaagcaataatcttaacaacctctttcctgaatatttaaatgtgtttgtatggtgttatgactaattgttactgatttagagactaagccctcttaaaacctttagttaaatataaaaagaaattatatatatcttgcctccctgatggaaaactatataaaattgtagacttaaaaggtttgtggaaatacattaggatatcagaaaactaaatatatggagttgctttatgactattacatgttaaataaaaatagcttaattgttaaaaaaaaaaaaaaaaaaa

SEQ ID NO: 360 - DNA, 1271 bp, Homo sapiens
tgggcgcggccatgttggaggctccgggcccgagtgatggctgcgagctcagcaaccccagcgccagcagagtcagctgtgccgggcagatgctggaagtgcagccaggattgtatttcggtggggccgcggccgtcgcggagccagatcacctgagggaagcgggcatcacggccgtgctaacagtggactcggaggagcccagcttcaaggcggggcctggggtcgaggatctatggcgcctcttcgtgccagcgctggacaaacccgagacggacctactcagccatctggaccggtgcgtggccttcatcggtcaggcccgcgctgagggccgtgcggtgttggtgcactgtcatgcaggagtcagtcgaagtgtggccataataactgcttttctcatgaagactgaccaacttccctttgaaaaagcctatgaaaagctccagattctcaaaccagaggctaagatgaatgaggggtttgagtggcaactgaaattataccaggcaatgggatatgaagtggatacctctagtgcaatttataagcaatatcgtttacaaaaggttacagagaagtatccagaattgcagaatttacctcaagaactctttgctgttgacccaactaccgtttcacaaggattgaaagatgaggttctctacaagtgtagaaagtgcaggcgatcattatttcgaagttctagtattctggatcaccgtgaaggaagtggacctatagcctttgcccacaagagaatgacaccatcttccatgcttaccacagggaggcaagctcaatgtacatcttatttcattgaacctgtacagtggatggaatctgctttgttgggagtgatggatggacagcttctttgcccaaaatgcagtgccaagttgggttccttcaactggtatggtgaacagtgctcttgtggtaggtggataacacctgcttttcaaatacataagaatagagtggatgaaatgaaaatattgcctgttttgggatcacaaacaggaaaaatatgaacatgatattttatagcttgggaagaaacttgcagatgatatgtgctgcctttgcttcttatcattcatggcagattgttagtgctttcaacatttcatttgaaatgggagaagataaaatcacttgatgtaacctggaaactatgctttacatggcaatcaaagccttttgatcatgtacattttatttgatattaaaatcttttataaccagaaaaaaaaaaaaaaaaaaaaaaa

SEQ ID NO: 361 - DNA, 1535 bp, Homo sapiens
cgatatgccacacagtacttccaggtggagggataccgccaatgacaatgagggccactcggatggcctggcaagaagagggagaggcgagagttcaagtggctatcccgagccaaagtaccctgaagacaaacgggaagcgaggagtgaccaagtgaaaccagaaaaggtgccgagacgacgacgcaccatggccgaccctgacttctggacgcacagtgatgattactacaaatactgcgacgaagactctgacagtgacaaagagtggattgctgctctgcgtcggaaatatcgaagccgagagcaaaccctgtcctccagtggtgaaagctgggagactctgccggggaaagaagagcgggaacctccacaggctaaggtgagtgccagcactggcaccagccctggccccggtgctagtgccagtgccggggctggcgccggggccagtgctggcagcaatggcagcaattaccttgaagaagttcgagaaccatcccttcaggaagagcaggcatccctggaagaaggagaaattccttggctccagtaccatgagaatgacagtagcagtgagggggataatgattctggtcacgagttgatgcaacctggggtattcatgctggatggaaacaacaaccttgaagatgactccagtgtgagcgaagacctagaagtggattggagcctctttgatggatttgcagatgggttaggagtggctgaagccatttcctatgtggaccctcagttcctcacctacatggcacttgaagaacgcctggcccaggcaatggaaactgcccttgcgcacttggagtctctcgcagtggatgtagaggtggccaatccaccagcaagcaaggagagcattgacgctcttcccgagatcctggtcactgaagatcatggcgcagttggtcaggagatgtgctgccccatctgctgtagcgaatatgtgaagggggaggtggcaactgagctgccgtgccaccactatttccacaagccgtgtgtgtccatctggcttcagaagtcaggcacctgccccgtgtgccgctgcatgttccctcccccactctaaagaccaaggccgtttactcctggtctgattattttccccatctgaaatccacaatactgcaggagccctcttgaaattaacaatggaaataaaaccaatcagtcagttagcctaaacctattgattcctcgtgattatttccaatgtgaaaacagttgtgtatgattgcattaaaaatcatatcatcttttagaggttagaaaagggaaaactaaactttctaaatgctacttgagattgcagtaagaagatacgttttctaacctgaaagttaaatcgcatttgttttcttcagtagaatgggaatgtgttgctgttacttgtaatgtcaagtttatctgttaaatatgtccaaaaggcaaaatcatttttgttgcatgttatgggtcgatgttcctgtaattgcagtgccgtaaaagcttattaaagttgttcttttggtttt

SEQ ID NO: 362 - DNA, 1226 bp, Homo sapiens
gctgccgcatcccaggctaagcgccgcgccgaaagccgtgcggagattggaggccgcgcgggtccctggtctgggccatgtctggctgtgatgctggggagggagactgttgttcccggagatgcggcgcgcaggacaaggagcatccaagatacctgatcccagaactttgcaaacagttttaccatttaggctgggtcactgggactggaggaggaattagcttgaagcatggcgatgaaatctacattgctccttcaggagtgcaaaaggaacgaattcagcctgaagacatgtttgtttgtgatataaatgaaaaggacataagtggaccttcgccatcgaagaagctaaaaaaaagccagtgtactcctcttttcatgaatgcttacacaatgagaggagcaggtgcagtgattcatacccactctaaagctgctgtgatggccacacttctctttccaggacgggagtttaaaattacacatcaagagatgataaaaggaataaagaaatgtacttccggagggtattatagatatgatgatatgttagtggtacccattattgagaatacacctgaggagaagaccctcaaagatagaatggctcatgcaatgaatgaatacccagactcctgtgcagtactggtcagacgtcatggagtatatgtgtggggggaaacatgggagaaggccaaaaccatgtgtgagtgttatgactatttatttgatattgccgtatcaatgaagaaagtaggacttgatccttcacagctcccagttggagaaaatggaattgtctaagccaaaagaaagtctaattatatacagagataaagctaaacgtaattattatttaaatgaaagctatttttttaaatgaattgaaatttttcatgatgctactaatttgccactaaatactgcaaatggtcaccctgaatctcttctgacattggatgttatttgcttatattcttataattttaaatgagggcacagtgaaatgaaaattttatactctatgtttctgtttatttttaaatccttaacagcaaaatatttgcctttaatttcttttttatatatactctcgagagaattcctcttaatttttaaagatgctggtgataataaaattcattagaaaatttcctcattgtggaatgagcattctcttgttttaatgttggtgtcagaaaataaatatgaaacattaagtcc

SEQ ID NO: 363 - DNA, 2540 bp, Homo sapiens
attgggctgttgagcgggggccgaccgacggccaggagtttcttttctgcgcttgtgcgttttctgttcggtttccttcccgctagcggggccacgagggttgctaggcaacagcccctgggtgacttggtcttagggtcctgtccggcttggggctgatgaaaggagctgtccgcgcccgggctcttccgagaagtggttgctgacagccacaaagtgaaagggagtgaggcggcgtggacgagtaaggagtgacagtgaggattcacatttgggttatttcaagatgagcttcctactgcccaagctgactagcaaaaaggaagtagaccaggcgataaaaagtactgctgagaaggtgttggttctcaggtttgggagagatgaagatcctgtctgtctgcagctagatgatattctttctaagacctcttctgacttaagtaaaatggctgctatatacctggtggatgtggaccaaactgcagtttatacacagtattttgacatcagttatattccatctactgtctttttcttcaatgggcagcatatgaaagtggattatggatctccagatcacactaagtttgtgggaagcttcaaaaccaaacaagacttcatagatttgattgaagtaatctatcgaggagcaatgagggggaagcttattgtccaaagtcctattgatcccaagaatattcccaaatatgaccttctctatcaagacatttagtacattaattgctgtcaaagatgaagaagaaggcacatcttgacacagtacctgaatccagctgtgctgtgtttctggagtcctttggaaacatgtgtcccagaggagaagaggtttgacttgcgtgtagaaaacccggcccctgaggaaaagaccccactggttctctgatgacctgggatgcctaactgtctactccctgcaagcctcagagcagccaagtcattggtgttcattttccccacagtgatttttgtaacttctctttctaatgtttttctttatccctttaatacagaaccctcccaaacattggctagtacaacttgatttcatcatgttcatttgatacacaagtgaactggaaagtcacttcccatagaagcaaaagtacttattttctaccctagctgggtgcatgtgtgtgcacacacacacacacacacacccccacacccctttgccggttcctcgactcatacatccctcgtgctttcccatctccagtctgtattactgtaggttctcttcaaataattaattgagcagacaagtttgttttattttggagcctttttggctctggcttttaaacattgtcctggttggctcatttaattttttttttttttttgagaccgagtcactcttgtcacccaggctggagtgcagtggcgcgatctcggctcactgcaagctccacctcctgggttcatgccattctcctgcttcagcctcctgagtagctgggactacaggcgcccgccaccatgcccagctaattttttgtatttttatagaggcgcagtttcaccgtgttagccaagatggtctcgatctcctgacctcgtgatctgccctcctcagcctcccaggtgctgggattataggcgtgagccaccgcgcgcaccccatttaattattttttatgttataaaatttaatatggaaagtgagaatttgaaccttcaccatccaccactctattcaggtaaaacaatgaatgagccaccttagcaggagcagatttttcccagaagctgctgcctcttcctgaggcagaaaattggattactaaggctcaaaactaaaagagatgtcagcattgttggatagaaatgtcacctatatgggatttgcctgttttaataactttgtaaggaattcttgctcttctaggggtgcctggcgcaaccgtgggcaagttactgctcctctttaaacctcgtggtggttattgaaacagatttattagaaggagagggtaggtgcagagctggagagccatgggtgaggcagcttgtgacctgcctagcagccgctgaccacctctccaacagaagcctagtcctgttcagagcagcactgtcactgcaagtccagccccctttgccaggggctccattccacccctttcctgcagggaggggtgccatgagtcttgcttttggctcatacaggagagagggaaggctgccaggcactgcttgtatccctgctgataagaggagggagtcactccaggaataagacaaaaggagaggaggaggccatcacctctggcctcttccatcgtacacttcctgtctctggtttaatcatgatgcatggagctacaacagccatcttaggtccccgaggtgcccagcatcacgtaaaacatcgatatgctaagaagaacaaaaagagcccaatctctgatgttattgagctcctgcatgaactctggacctgcctgcctcagacttctgtgaaagaataaaatttctttttgcctaaaaaaaaaaaaaaaaaaaaaaaaaaa

SEQ ID NO: 364 - DNA, 4368 bp, Homo sapiens
cgaaatgagagcaaaaagggagagagcaggaaagcgagcacaggcgagtacagtatacaaagtgttttgagtttctgactggcgtgccggaaagatcatgttagcacacccagaaactccacacgatgcagaccccagaggtaccagcagaaaggtcccctcgtagacggagtatctcagggaccagtacatcagagaaacccaactccatggacactgcaaatacctcacccttcaaagtaccaggattcttcagcaagcgcctgaaaggctccatcaagaggaccaaaagccagtcaaagcttgacagaaacacgagctttcggcttccatcccttcgcagtacagatgacaggtctcgtgggctgcctaaactaaaagagtcacgttcccatgaatccttgctgagcccatgcagcacagtggaatgtctggatcttggtagaggggaacctgtatcagtgaaaccacttcatagtagcatccttggacaagacttctgctttgaggttacctacttaagtggaagtaaatgcttcagctgtaattctgcttctgagagagacaagtggatggaaaaccttcgcaggacagttcaacctaataaggacaattgcaggcgagctgaaaatgttcttcgtttatggatcattgaagccaaggaccttgcccctaaaaagaaatatttctgcgaactgtgccttgatgataccctctttgctcgtacaaccagcaagaccaaagcagacaatattttctggggcgaacattttgaattcttcagccttccacctcttcatagtatcacagttcacatttacaaggatgtggaaaaaaagaaaaaaaaggacaagaataattatgtagggctagtcaacatccccactgccagtgtgactggtcgccaatttgtagaaaagtggtatccagtgagtacacctacacccaacaaaggaaagacaggaggaccttctattcggattaaatcacgtttccaaactatcaccattctgcctatggagcaatacaaagaatttgcagaatttgtcaccagcaactacaccatgctgtgttctgtccttgagccagtaattagtgtgagaaataaagaggagttggcttgtgccttagtgcacattcttcaaagtactggcagagccaaggattttctgactgacttggtgatgtctgaggtggatcgttgtggagagcatgatgtcttgatcttcagagagaacactattgccaccaaatccattgaggaatacctcaagttggtgggacaacagtatcttcatgacgcactgggggagtttatcaaagctttgtatgagtccgatgagaactgtgaagtggatcccagcaaatgttcatctagtgaactgatagaccatcagagcaacctgaaaatgtgctgtgagctggctttctgcaagatcatcaactcttactgtgttttccctcgtgagttgaaagaagtgtttgcatcatggaagcagcagtgcctgaaccgtggcaagcaagacatcagcgagaggctcatcagtgcctcattatttctccgttttctgtgtccagccattatgtctcccagtcttttcaaccttatgcaggagtatcctgatgaccgcacatctcggactctaactcttattgccaaggtcattcagaacctggccaactttgccaagtttggtaacaaagaggaatacatggcattcatgaatgattttttagaacatgaatggggtggaatgaagcgctttcttttggagatctctaatccagacaccatctcaaacaccccaggctttgatggttacattgatctgggccgagagctttcagttttgcattccttactgtgggaagtagtttcccaacttgataagggtgaaaattccttcctacaggcgaccgtggcaaaattggggcctctccctcgtgttcttgctgatattaccaagtcattgactaatcctacgccaatacaacagcaactgagacgcttcactgaacataactccagtccaaatgtcagtggaagcctctcctctgggctgcagaaaatatttgaagaccccactgacagtgatttgcataaactaaaatctccaagccaggacaacacagacagctacttcagagggaaaacattattgctggttcagcaagcctcctctcagagcatgacttattctgaaaaggatgaaagggaaagtagccttcctaatggtcggagcgtctccctcatggacctccaggacactcatgctgctcaagtggagcatgcatctgtcatgcttgatgtgcctatacgcttgaccggaagccagctttccataacccaggtggccagcatcaaacagctgcgggaaacccagagcactccccaaagtgcaccccaagtgagaaggcccctgcacccagccttgaaccagccaggtggccttcagcccttgtcgttccagaaccctgtctatcacctcaataacccaattccagcaatgccaaaggcctctatagattccagtttggagaacctaagcactgccagttccagaagccaaagtaacagtgaagacttcaagctcagtggacccagcaatagcagcatggaagatttcactaaacgtagcactcagagtgaggacttctccaggcggcacacggtgccagatagacacatacctcttgctttgccacgacaaaatagtactgggcaggcccagatccgaaaagtggaccagggtgggttaggtgcccgagccaaagccccaccatccctgccacacagtgcttctttacgtagcaccgggagcatgtcagtggtgtccgcagccctggtggccgaacctgtgcagaatgggagccggtcccggcagcagtcctcttcctccagagagagccctgttcccaaagttagagcaatccagagacaacagacacagcaggttcagtcacctgtggactctgccacaatgtccccagtagagaggacagcagcctgggttctgaacaatgggcagtatgaagaggatgtggaagaaactgagcaaaatctagatgaagccaagcatgctgagaagtatgaacaagaaattactaaactgaaggagcgcctgagagtttccagccggcgactggaggaatatgaacgccgcttgctggtgcaggagcagcagatgcagaagctgctgctggaatacaaggcccgactggaggacagcgaggagcggctccgaagacagcaggaagaaaaagatagccagatgaaaagcatcatcagcaggctaatggctgtggaagaggaactgaagaaggatcatgctgagatgcaagcagttattgatgcaaagcagaaaataattgatgcacaggaaaaacggatcgtgtccctggattcagccaacaccagactgatgagcgcgctgacccaagtgaaggagcggtacagcatgcaggtccgcaatggcatctcccccaccaaccccaccaagctttccatcacggagaatggtgaattcaaaaacagcagctgctgacgggctttgtctgtggaaggagacagaaggaaattgacccactctcctatctccagacctttacctagcccctccaggtttacagaatgttgctacttcacaatggcgatgtggtgagaaactcctgaatgaagaaaggaaccttgtctttcagggcataaggcggcgacttccaaggtcaatgcttttcccccacatctctatgtacatagggaacttagttctgggccatgtacagaaaatatcactgtaatataccaaaaggaagttaataatgtagattacctttttgattattgctatttttattattgttttcctcttgttgaaagcactgcagttgttacaggaagtaaagtaggaatgttgtgtgagcgagacatgagcctgtagttcagtaggtagagaccaagcatctatctgatagaacacatggagtgcaataggacattgtgagaaggatttttcagggattcatctactagtttaaaaaccccactctggccctcttgtcctttcagaaaacatgcaaataccaagatccatacaaaacaataatttattccactgatcaaccaagactggttctggttggacagctaatctgatttggggattcactgtttcagaggacacagacaaaagctgttgcatcaaaactggactttaggagtaatttctattgaactcctgtcaatatgtttatttcctctgtctacagcagatgggagtcttctcttttagacaggggctttttgtttttaaccccaattgtaataaagggtgttctttttcctctttagaaaaaaaaaaaaaaaaaaaa

SEQ ID NO: 365 - DNA, 2077 bp, Homo sapiens
agagcaaagaaaaatccaattgcctgcacaataaaaagttgtcagagaagaaagtgaagtctcccctgcatttattttctactttgcgcaggtcgccaagttatcctccccctggttgtggcaaaagcaaatccaaactgaaatctgagcaggacggaatctccaaaacgcataagctgctgcggaggacttgttccagcacagttaagactgatgatgtgtgtgtcacaaagtcacacaggacctttggccgctccttgtccagcgatcccagggcggagcaggctatgacagcaattaaatcgcacaaacttttgaaccgtccttgccctgcagctgttaagtcagaggaatgcctaactctaaagtcgcatagactattgactcgatcttgttctggagatccacgatgtgagcacaacacaaacttgaagccccataaactgttaagcaggtcttactctagtaatctcagaatggaagaattatatggactgaaaaatcacaaattgctcagcaagtcctactccagtgcccccaagtcatccaaaactgagcttttcaaggaacctaacgcagagggcaggaggctctctcttacctcagggcttattggtatcctaacaccatcttcatcttcatcttctcagcttgctccaaatggtgcaaaatgcattccagtacgagaccgtggcttcctggtgcagacaattgagtttgctgaacagcggatccctgtattaaatgaatattgtgtggtttgtgatgagccacatgtgtttcaaaatggccctatgcttaggcctaccgtatgtgaacgggagctgtgtgtgtttgcttttcaaaccctgggagtaatgaatgaagctgctgatgaaatagcaactggagctcaggtggtagatctactagtatccatgtgtaggtctgcgttggaatctcctagaaaagttgtgattttcgagccatatccttctgtggtagatcctaatgatcctcagatgttggccttcaaccccaggaaaaagaactatgatcgagtaatgaaagcactggatagcataacttctatcagagaaatgacacaagcaccatatctggaaatcaagaagcaaatggataaacaggacccccttgctcatcccttactgcaatgggttatatcaagtaatagatcacatattgtgaaactgccagttaacaggcaattgaagtttatgcatactccacatcagttccttcttctcagcagtccaccagccaaagaatccaattttagagctgctaaaaaactctttggaagcacctttgcatttcatggctcacacattgaaaactggcactccatcctgaggaatggtctggttgttgcttctaatacacgattgcagctccatggtgcaatgtatggaagtggaatctatcttagtccaatgtcaagcatatcatttggttactcagggatgaacaagaaacagaaggtgtcagccaaggacgagccagcttcaagcagtaaaagcagcaatacatcacagtcacagaaaaaaggacagcaatcccaattcctgcaaagccgtaacttaaaatgcatagccttatgtgaagtgatcacctcatctgacctgcacaaacatggagagatatgggttgtccccaatactgaccatgtctgcacacgattctttttcgtctatgaagacggccaagtgggagatgcaaatattaatacacaagaaggaggcattcacaaagagatcctccgagtaattggtgatcaaactgctactggttaaaggaccaccatttaattaacatgattcgaaagccttcctcgggttcaaagctggattttgaactgaagaagattataaaattatttattgttattataaacaaaattaaccctttgaatactgattttttttcttagtatttctaagtatctcattaaatacctaaaatggtataagatttatcaattgtagggttatggaatctagtaataaaatttcaacagcacttaaactgaagtttgggttgctcatacaataaacagattgaaaaaaaaaaaaaaaaa

SEQ ID NO: 366 - DNA, 1442 bp, Homo sapiens
  modified_base (5)..(5): a, c, g, t, unknown, or other
  modified_base (11)..(11): a, c, g, t, unknown, or other
  modified_base (15)..(16): a, c, g, t, unknown, or other
  modified_base (18)..(18): a, c, g, t, unknown, or other
  modified_base (20)..(21): a, c, g, t, unknown, or other
  modified_base (24)..(24): a, c, g, t, unknown, or other
  modified_base (26)..(28): a, c, g, t, unknown, or other
  modified_base (30)..(33): a, c, g, t, unknown, or other
  modified_base (35)..(35): a, c, g, t, unknown, or other
  modified_base (37)..(46): a, c, g, t, unknown, or other
  modified_base (49)..(50): a, c, g, t, unknown, or other
  modified_base (55)..(55): a, c, g, t, unknown, or other
  modified_base (195)..(195): a, c, g, t, unknown, or other
  modified_base (210)..(210): a, c, g, t, unknown, or other
  modified_base (219)..(219): a, c, g, t, unknown, or other
  modified_base (223)..(223): a, c, g, t, unknown, or other
  modified_base (310)..(310): a, c, g, t, unknown, or other
  modified_base (313)..(313): a, c, g, t, unknown, or other
  modified_base (331)..(333): a, c, g, t, unknown, or other
  modified_base (410)..(410): a, c, g, t, unknown, or other
  modified_base (412)..(412): a, c, g, t, unknown, or other
  modified_base (460)..(460): a, c, g, t, unknown, or other
  modified_base (464)..(464): a, c, g, t, unknown, or other
  modified_base (481)..(481): a, c, g, t, unknown, or other
  modified_base (483)..(484): a, c, g, t, unknown, or other
  modified_base (512)..(512): a, c, g, t, unknown, or other
  modified_base (520)..(520): a, c, g, t, unknown, or other
  modified_base (524)..(524): a, c, g, t, unknown, or other
  modified_base (599)..(599): a, c, g, t, unknown, or other
  modified_base (610)..(610): a, c, g, t, unknown, or other
  modified_base (616)..(617): a, c, g, t, unknown, or other
  modified_base (621)..(622): a, c, g, t, unknown, or other
  modified_base (625)..(625): a, c, g, t, unknown, or other
  modified_base (636)..(636): a, c, g, t, unknown, or other
  modified_base (644)..(644): a, c, g, t, unknown, or other
  modified_base (652)..(652): a, c, g, t, unknown, or other
  modified_base (661)..(661): a, c, g, t, unknown, or other
  modified_base (670)..(670): a, c, g, t, unknown, or other
  modified_base (676)..(676): a, c, g, t, unknown, or other
  modified_base (682)..(683): a, c, g, t, unknown, or other
  modified_base (693)..(693): a, c, g, t, unknown, or other
  modified_base (705)..(705): a, c, g, t, unknown, or other
  modified_base (715)..(715): a, c, g, t, unknown, or other
  modified_base (1332)..(1332): a, c, g, t, unknown, or other
  modified_base (1364)..(1364): a, c, g, t, unknown, or other
  modified_base (1369)..(1373): a, c, g, t, unknown, or other
  modified_base (1376)..(1377): a, c, g, t, unknown, or other
  modified_base (1379)..(1379): a, c, g, t, unknown, or other
  modified_base (1381)..(1381): a, c, g, t, unknown, or other
  modified_base (1383)..(1383): a, c, g, t, unknown, or other
  modified_base (1385)..(1385): a, c, g, t, unknown, or other
  modified_base (1387)..(1387): a, c, g, t, unknown, or other
  modified_base (1389)..(1389): a, c, g, t, unknown, or other
  modified_base (1391)..(1391): a, c, g, t, unknown, or other
ggggngaagcngggnngncnnggngnnncnnnngngnnnnnnnnnnggnnggggngtgagaggttttctcgctctagggagattcttcaagcaatcactatgtcaacagacacaggtgtttcccttccttcatatgaggaagatcagggatcaaaactcattcgaaaagctaaagaggcaccattcgtacccgtnggaatagcgggtttngcagcaatntgtngcatatggattatataaactgaagagcaggggaaatactaaaatgtccattcatctgatccacatgcgtgtggcagcccaaggcttngtngtaggagcaatgactgtnnngtatgggctattccatgtatcgggaattctgggcaaaacctaagccttagaagaagagatgctgtcttggtcttgtngnaggagcttgctttagttagatgtcttattattaaagttacctattatntgtntggaaataaactaattntnnatgggtttagatggtaacatggcatttntgaatatntggnttcctttcttgcaggcttgatttgcttggtgaccgaattactagtgactagtttactaactaggtcattcaaggnaagtcaagttnaacttnnaaannatngtcacctaaantgcacttngatggtgnttgaaatgntccaccttncttaanattttnnaagatgaacnttagttctaaangaagataacnaggccaatcctgaaggtactccctgtttgctgcagaatgtcagatattttggatgttgcataagagtcctatttgccccagttaattcaacttttgtctgcctgttttgtggactggctggctctgttagaactctgtccaaaaagtgcatggaatataacttgtaaagcttcccacaattgacaatatatatgcatgtgtttaaaccaaatccagaaagcttaaacaatagagctgcataatagtatttattaaagaatcacaactgtaaacatgagaataacttaaggattctagtttagttttttgtaattgcaaattatatttttgctgctgatatattagaataatttttaaatgtcatcttgaaatagaaatatgtattttaagcactcacgcaaaggtaaatgaacacgttttaaatgtgtgtgttgctaattttttccataagaattgtaaacattgaactgaacaaattacctataatggatttggttaatgacttatgagcaagctggtttggccagacagtatacccaaacttttatataatatacagaaggctatcacacttgtgaaattctcttgtctaatctgaatttgcattccatggtgtnaacatggtatatgtattgttattaaagtaagngaccnnnnncannanananananananacacacaccctgagagagagaaagagagagagatcactaaagagagagaac

SEQ ID NO: 367 - DNA, 3208 bp, Homo sapiens
  modified_base (145)..(145): a, c, g, t, unknown, or other
  modified_base (2136)..(2136): a, c, g, t, unknown, or other
  modified_base (2848)..(2848): a, c, g, t, unknown, or other
  modified_base (3014)..(3015): a, c, g, t, unknown, or other
  modified_base (3167)..(3167): a, c, g, t, unknown, or other
  modified_base (3199)..(3199): a, c, g, t, unknown, or other
aaaactcttctcagacccgggagcgtccgggacgcggagcccggagctggggcgacgaggcgattgcgggggcctgggctagctgctggctaccaatattctactttctgtctctatgtatgtgactaccctggttacctcatanaatctccctggaaaaggagacatgaatgtctgcaatgatacttcctgacaagaagttgatacaagaaaaggaaaggagattaacagctagtgagcagaatttcgaacagcaggatttcgtattttttgcttccaactgcacacttccgttgcccacttttaaatcagagatacctacactcaaaacccagacaaggcaaaaggatacttttcttgtatattttttgagatcgaagaaacgacaatgtccaggaaacagaaccagaaggattcatcaggattcatttttgatttgcagtccaataccgtactggcccagggaggagcttttgagaacatgaaagagaagataaatgcggtacgtgcaatagttcctaataagagcaacaatgaaattatcctggttttgcagcactttgataactgtgtggacaaaacagtacaagcattcatggaaggtagtgccagtgaagtactcaaagaatggacagtaacaggcaagaaaaagaacaaaaagaagaaaaacaaaccgaaacctgccgcagaaccaagtaacggcatcccagattccagtaaatcagtttccattcaagaggaacagtctgcgccttcctcagagaaaggtggtatgaatggctaccatgtcaatggtgccatcaatgacactgagtctgtggactcactcagtgaaggtttggagacactttcaatagatgccagagaattggaggatcccgagtctgccatgctagatacgctggatagaacaggatccatgctgcagaatggtgtctctgattttgagaccaagtctttgactatgcactctattcacaattctcaacaacccaggaatgctgccaaatctctctcaagacctaccacagaaactcagttttcaaatatggggatggaagatgttcccctcgccaccagtaaaaagctaagttccaatattgaaaaatctgtaaaagacctccagcgctgcacagtgtctcttgcacggtatcgagttgtagttaaagaagagatggatgcctccattaagaaaatgaaacaagcctttgctgaattggagagctgtttaatggatcgagaagtggcgttgcttgctgaaatggacaaagtgaaagctgaagcaatggaaattttgctcagccgacaaaagaaggctgaacttctaaagaagatgactcatgtggctgttcaaatgtcagagcagcaattggttgagctcagagctgatatcaagcactttgttagtgaacgtaaatatgatgaggatctgggacgagtagcccggttcacctgtgatgtagagaccctaaagaagagcattgattcatttggacaagtgtctcatccaaagaacagctattcgaccagatcccgatgtagctcagttacatctgtgtccttgagtagcccaagtgatgcctctgctgcttcctcttccacctgtgcctctcctcccagccttacaagtgctaacaagaaaaactttgcaccgggagagactcctgcagccatagcaaactccagtggccagccctaccagccacttcgggaggtattgccagggaacagacgaggaggacagggctataggccacaaggccaaaagtccaatgaccccatgaaccaagggcggcatgacagtatgggtcgttacagaaacagctcgtggtattcatctggttccaggtatcagagtgctccatctcaggcaccaggaaacaccattgaaagaggccagactcactctgcagggaccaatggaactggagtcagcatggagcccagccctcccacgccttcattcaaaaaggggctcccccagcgcaaacccaggacctctcagactgaagccgtgaactcttgagagaaaatccagttggcctctctcctctatccacacaattcaacttgataactggactttaggaaacttacagttagatgtaataacaaaaagaagtttatgcgtatcantttttgtgccattctaagtatttttggtttcttgtctccttatttcctctttaccatttttggaggggaagctattttttttccttgatctttcccagtgatatggattgaatctggttggtcatttccaccaggaatcagaggcagctgttaccaggtttcggccttccagttgatccctccactgtccaggctgtctcaggaggaggtgaatcagagctagtctgtcacctttccaatctaagccgaagccacaggtgcctgacaggttcccttctaacaactatttgaccaagagaggcaatcagggggttgtatactgcactggattcgccagagaagggaaaatttaattagtgaaaaggaaagaacactaggaaacatttgagaacctgcctctatcccagaatgtgctggagatttgacactcaaatcagtgtttagtcttctgcttggcaccatagcttaacctgcagtttcttcaaaatgcccaatgccttgtttcctattaccttagattgcaaaccagtctagggaagtctatgagaaagtagcatttaattaaagtttaaaaaaaaaaaggttgggcgttgtggctcatgcctgtaatcccagcactttgggaggctgaggcgggtggatcactaggtcaggagttcaagaccagcctggccaacatggtgaaaccctgtctgtactaaaaatacaaaanttagctgagcatggtggcgtgtgcctgtaatctcagctactcaggaggctgaggcaggagaatcgcttgaacccaggaggcggaggctgcagtgagctgagattgtgccactgcactccagcctgggagacagagcaagactcagtctcaaaaaaaaaaaaaaaanngcatttttctgttttaatgtttggagacttttttttttgttctctccctttcctgaaccctattctgatcctgaaccaaatttatagcaatataattagtgttaatctaaggcattactcatcaaaaaaattgctgcagtctttacagttgnataaataaaaacaactgcataaatatgcccanaaaaaaaaa

SEQ ID NO: 368 - DNA, 3786 bp, Homo sapiens
  modified_base (238)..(238): a, c, g, t, unknown, or other
  modified_base (260)..(260): a, c, g, t, unknown, or other
  modified_base (2002)..(2002): a, c, g, t, unknown, or other
  modified_base (2148)..(2148): a, c, g, t, unknown, or other
  modified_base (2951)..(2951): a, c, g, t, unknown, or other
  modified_base (2954)..(2954): a, c, g, t, unknown, or other
  modified_base (2956)..(2956): a, c, g, t, unknown, or other
  modified_base (3003)..(3003): a, c, g, t, unknown, or other
  modified_base (3005)..(3007): a, c, g, t, unknown, or other
  modified_base (3010)..(3010): a, c, g, t, unknown, or other
  modified_base (3019)..(3019): a, c, g, t, unknown, or other
  modified_base (3021)..(3021): a, c, g, t, unknown, or other
  modified_base (3029)..(3030): a, c, g, t, unknown, or other
  modified_base (3035)..(3035): a, c, g, t, unknown, or other
  modified_base (3037)..(3037): a, c, g, t, unknown, or other
  modified_base (3051)..(3051): a, c, g, t, unknown, or other
  modified_base (3053)..(3053): a, c, g, t, unknown, or other
  modified_base (3078)..(3078): a, c, g, t, unknown, or other
  modified_base (3089)..(3089): a, c, g, t, unknown, or other
  modified_base (3131)..(3131): a, c, g, t, unknown, or other
  modified_base (3166)..(3166): a, c, g, t, unknown, or other
  modified_base (3598)..(3598): a, c, g, t, unknown, or other
  modified_base (3648)..(3652): a, c, g, t, unknown, or other
  modified_base (3758)..(3758): a, c, g, t, unknown, or other
aaaaatgtgtgtttgtgggtgaaatggctgcgcaggtcggagcggtgcgcgtagtacgggcggtggcggcgcaggaggagccggacaaagaggggaaggagaaacctcatgctggggtctccccgcggggagttaaacggcagcgccgatctagcagtggggggtctcaggagaagcgggggcggccgagccaggagccccctctcgctccccctcaccggcggcgtcgcagccgccnacatcctgggccgctgccgccnacgaatgcagccccaactgtcccaggccctgttgagcctcttctcctgccgcctccgccgccaccttcgctggcacccgccgggcccgctgtcgctgcccctctcccggccccaagcacctcggccctcttcaccttctcgcctctgacggtgagcgcggccgggcccaagcataagggccacaaggagcggcacaagcaccatcaccaccgcggccccgatggtgatcccagctcctgcggaaccgatctcaagcacaaggacaagcaggaaaacggcgagaggactggaggggtgcctctgatcaaagcccccaagagagaaacaccagatgaaaatggtaaaacccagagagccgatgattttgtcttgaagaaaataaagaagaaaaagaaaaagaaacaccgagaagacatgcgaggaagacgccttaaaatgtacaataaggaagtacaaaccgtctgtgctggcctgacccgcatcagtaaagaaattctcacccaaggacaaataaatagcacttcaggacttaataaggagtccttcaggtatctgaaagatgaacagctgtgccgattaaatttgggtatgcaagaatatcgggtaccccagggagtacaaacaccttttatgactcaccaggaacattctattcgtagaaatttcttaaaaacaggtactaaatttagcaactttattcatgaggaacaccagtccaatggtggtgctcttgtccttcatgcttacatggatgaactctcatttttgtctccaatggagatggagagattttctgaggagtttcttgctttgacattcagtgaaaatgagaaaaatgctgcttactatgctttagcaatagtgcatggagcggctgcttatctcccagacttcttggactactttgcttttaatttccccaacactccagtgaaaatggaaattctgggcaagaaagatattgaaacaaccaccatttcaaattttcacactcaggtcaacaggacatactgctgtggcacctaccgagcaggtcctatgcggcagataagtctcgttggagcagtagatgaagaagttggtgattatttcccagagttccttgatatgttagaagaatcaccatttctgaaaatgactttgccctggggtacactttctagcctccgactccagtgtaggtcccagagtgatgatgggcctataatgtgggtaaggccaggagaacagatgatccctacagcagatatgccaaagtcacccttcaaaagacgacgatcaatgaatgaaataaaaaatctccagtacctacctcggaccagtgaaccccgcgaagttctctttgaagataggactagagctcatgctgatcatgtcggtcaggggtttgactggcagagtacggctgctgttggagttttgaaagctgtacaatttggtgaatggagtgaccaacctcgcataaccaaagatgtgatttgttttcatgctgaggattttactgatgttgtacaaagacttcagttagatcttcatgaacctccagtttcccagtgcgtacagtgggtagatgaagctaaactaaaccaaatgaggcgggaaggcattcgttatgctagaattcagctttgcgacaatgatatctacttcatccctagaaatgtcattcatcagttcaaaacagtttcggcggtgtgcagcttagcctggcatataaggcttaaacagtaccaccctgttgntggaagccactcaaaacacagaaagcaattctaacatggactgtggtttaactggaaagcgagaattagaagttgactcccaatgtgtgaggataaaaactgaatctgaagaagcatgcacagagattcagctgttaacaactgcntcatcatctttcccacctgcatcagaacttaatctacagcaagatcagaagactcagcctattccagttttaaaagtggaaagtagactggactctgaccagcaacacaatctgcaagaacattcaaccacttctgtgtgatatgtacatattcaaacacattttttaacttttttaaattttgatgtgaagttatagttttataactggcttaagttaagttttattggagaaatcttgcctataattctataaagagaaatgacattccacaaatgtcaagcatatcttttttacacagattatgcaaagttaagagttgtatcttatcccgttagtacagtatgtaatagtgggtctgctgctactttctgttttaaggtgtgaggtaacaattcaatctcttcttcaaatcaaaatgagaattctctggaataacagattcttgtttggtaaattattcacttcccttaattttatcttgccttgtctcttgccatatttgctgtttttatggataaataagatttatggtttagtacttgtgtctttatggcacaggttcaatttctacagtgaaaatggcataggttgcaggaaagaatttctgcatctggtacatgggcaagtaagttatttagttctaaccacaaataacaagtagtttccaaggaaatttcagtggctctctggtttcttaacaaaagagaaagcacagcactttctgatccaaactgtcttttttttgtatctgttatttaaagcccagtggatatttcaattaaaaaaaaaatctaaagatnaanantccttggtcattcattatccatggctcattaatctcttctagaatanannntanctgttgaananattttggnnaaaananataatgttgacatnanactctattgttctgcttcctggcancctcacatttngtggggataattttgcttcctaaactgatcacaactattaancttagagaataataatagtctttctgatgaggctnccatattttgagcatcaatcttatgataaactattcttgtcacttggcatcaacctcttcatgataaatatctactactgagacacttcaattcacagttttaactggtgaatacctgggtttatttactattactctgtgttgctattttctaagaaagaatacagcactagacttcatcctagagtttcaggtaggctaatgcttagtgcctgagtatttaaattttcttttcaaacaggcacagttcacattgctagtatggtcctaactttctgttattttagaatgttaacatgattcacattatactttctcttagttaataatacagtaggccttttgtttattaatggaagagtactccccacacctaagaccagattcttatatctccctggttacagtgcaatttggagatttttttttttncctggatggtaagatttgaaatatttacattaacataggcaaaaaaaaannnnnttttgaaatatcaaatatgaatcttctctaaaatattctgaaataggttaaatcttatataaatattactttgtgcaatatagctgtgtagttaaatgcatattancaaagtatagaggtcactgtgtaaaccg

SEQ ID NO: 369 - DNA, 1067 bp, Homo sapiens
tcgaccggctgcgagaagacgacagaagggggccgcgggacatccacggggcgcgagtgacacgcgggagggagagcagtgttctgctggagccgatgccaaaaaccatgcatttcttattcagattcattgttttcttttatctgtggggcctttttactgctcagagacaaaagaaagaggagagcaccgaagaagtgaaaatagaagttttgcatcgtccagaaaactgctctaagacaagcaagaagggagacctactaaatgcccattatgacggctacctggctaaagacggctcgaaattctactgcagccggacacaaaatgaaggccaccccaaatggtttgttcttggtgttgggcaagtcataaaaggcctagacattgctatgacagatatgtgccctggagaaaagcgaaaagtagttatacccccttcatttgcatacggaaaggaaggctatggtagtcttgaagaagtctttcttctgcaaaatatccttgtctcatgtcacagaacaaccctgcatgtcttgaaatgcatgtacttgttagtgcttaataacaatacatgcgcagaaggcaagattccaccggatgctacattgatttttgagattgaactttatgctgtgaccaaaggaccacggagcattgagacatttaaacaaatagacatggacaatgacaggcagctctctaaagccgagataaacctctacttgcaaagggaatttgaaaaagatgagaagccacgtgacaagtcatatcaggatgcagttttagaagatatttttaagaagaatgaccatgatggtgatggcttcatttctcccaaggaatacaatgtataccaacacgatgaactatagcatatttgtatttctactttttttttttagctatttactgtactttatgtataaaacaaagtcacttttctccaagttgtatttgctatttttcccctatgagaagatattttgatctccccaatacattgattttggtataataaatgtgaggctgttttgcaaacttaaaaaaaaaaaaaaaaaaaaaaa

SEQ ID NO: 370 - DNA, 4245 bp, Homo sapiens
  modified_base (18)..(19): a, c, g, t, unknown, or other
  modified_base (21)..(22): a, c, g, t, unknown, or other
  modified_base (25)..(28): a, c, g, t, unknown, or other
  modified_base (41)..(41): a, c, g, t, unknown, or other
  modified_base (43)..(43): a, c, g, t, unknown, or other
  modified_base (45)..(45): a, c, g, t, unknown, or other
  modified_base (60)..(60): a, c, g, t, unknown, or other
  modified_base (548)..(548): a, c, g, t, unknown, or other
  modified_base (551)..(552): a, c, g, t, unknown, or other
  modified_base (555)..(555): a, c, g, t, unknown, or other
  modified_base (1068)..(1068): a, c, g, t, unknown, or other
  modified_base (1070)..(1071): a, c, g, t, unknown, or other
  modified_base (1141)..(1141): a, c, g, t, unknown, or other
  modified_base (1160)..(1160): a, c, g, t, unknown, or other
  modified_base (1168)..(1168): a, c, g, t, unknown, or other
  modified_base (1172)..(1172): a, c, g, t, unknown, or other
  modified_base (1188)..(1188): a, c, g, t, unknown, or other
  modified_base (1214)..(1214): a, c, g, t, unknown, or other
  modified_base (1230)..(1230): a, c, g, t, unknown, or other
  modified_base (1244)..(1244): a, c, g, t, unknown, or other
  modified_base (1246)..(1248): a, c, g, t, unknown, or other
  modified_base (1250)..(1254): a, c, g, t, unknown, or other
  modified_base (1256)..(1256): a, c, g, t, unknown, or other
  modified_base (1258)..(1258): a, c, g, t, unknown, or other
  modified_base (1483)..(1484): a, c, g, t, unknown, or other
  modified_base (1891)..(1891): a, c, g, t, unknown, or other
  modified_base (2555)..(2555): a, c, g, t, unknown, or other
  modified_base (3040)..(3040): a, c, g, t, unknown, or other
  modified_base (3181)..(3181): a, c, g, t, unknown, or other
  modified_base (3595)..(3595): a, c, g, t, unknown, or other
  modified_base (3670)..(3670): a, c, g, t, unknown, or other
acagaatttacgcacccnngnnttnnnnggagcctagcggntntncccgcgtccaagatnggcggcagaagcagctggtgggaaatacagaagcacagtcagcaaaagcaaagacccctcggggctgctcatctctgtgatcaggactctgtctactagtgacgatgtcgaagacagggaaaatgaaaagggtcgccttgaagaagcctacgagaaatgtgaccgtgacctggatgaattgattgtacagcactacacagaattgacgacagccattcgcacataccagagcatcacagagcgcatcactaactcccgaaataaaataaagcaggtaaaagagaacctgctttcatgcaagatgctgctgcactgcaaacgggatgagcttcggaaactgtggattgaaggaattgagcataagcatgtcctgaacttgttggatgaaattgagaatatcaagcaagtgcctcaaaagctggaacagtgcatggccagcaagcactatctcagtgccactgacatgttggtgtcagcagttgagtctntgnnggnccccctgctccaggtggaaggactgagtgaccttcgactagagcttcacagcaagaagatgaaccttcacttggttctcatagatgaactacaccggcacctgtacatcaaatcgactagccgagttgtgcagcgtaacaaggaaaaagggaaaatcagctccctcgtgaaagatgcttctgttcctctgattgatgttacaaacctccctactcctcgaaaattccttgatacctctcactattctactgctggaagctcaagtgtgagggagataaatctgcaggacatcaaggaagatttagaattggatccagaggaaaacagcaccctgtttatgggtatcctcattaagggcttggcgaaactgaagaagatcccagaaacagttaaggcaatcatagagcgcttggagcaggagttgaagcaaattgtgaagaggtctacaacccaggtggcagacagtggctatcagcggggggagaacgttactgtggagaaccaaccaaggtngnntctagaactgctggagttactgtttgacaagtttaatgctgtagccgctgcacactctgtggtcctgggnatacctgcaggacactgtnagtgactnccantgactcagcaggaagntatcaaactgtatgatatggcagatntatgggtgaagatccnagatgttctacagntnnnannnnntnantacttggatatgaaaaatactcgtacggcctctgaaccatcagctcaactaagctatgccagcactggacgagagtttgcagccttttttgccaagaagaaacctcaaaggccaaaaaattctcttttcaagttcgaatcgtcctcccatgccatcagtatgagcgcctatctgcgagaacagagaagggagctctatagtcggagtggagaactgcaagggggnnctgatgacaacttaattgaaggtggaggaacaaaatttgtctgcaaacctggagccagaaacattaccgtcatattccacccattactaagatttattcaggagattgagcatgctctgggtcttggcccagccaaacagtgtcctcttcgagagtttctcaccgtgtacatcaaaaacatctttctcaatcaagtcttggctgagatcaacaaggagattgaaggagtcactaaaacatctgaccctttgaagattctggccaacgcagacaccatgaaggtgctgggagtgcagcggcctctcctacagagcacaatcattgtggagaagacagttcaagacctcctgaacctgatgcatgacttgagtgcatattcagatcaattcctcaacatggtgtgcgtnaagctccaggagtacaaggacacctgcactgcagcttacaggggtattgtccagtcagaagaaaaacttgtcatcagtgcatcctgggcaaaagatgatgatatcagcagactcttgaaatctctaccaaactggatgaatatggctcaacccaaacagctgaggccaaaaagagaggaggaagaagatttcataagggcagcttttggcaaggagtctgaagttcttattgggaacctgggtgataaattaatccctccacaagacatccttcgtgacgtcagtgacctcaaagccttggccaacatgcatgaaagcctggaatggttggcaagtcgaacaaagtcagctttctccaatctttctacatcccagatgctttctcctgctcaagacagccacacgaacacggatctccccccagtgtcagagcagatcatgcagactctcagtgaacttgccaaatcgttccaggatatggctgaccgctgcttgcttgtcttacatctggaagtgagggttcactgtttccactatcttatccctcttgcaaaggaggggaactatgccattgtggctaatgtggaaagtatggattatgaccccctggtggtcaagctcaacaaagatatcagcgccattgaagaggccatgagcgccagcnttcagcagcacaagttccagtatatcttcgaaggcctgggccacctgatctcctgcatcctcattaatggtgcccagtacttcaggcgcatcagtgagtctggcatcaagaaaatgtgtaggaacatttttgttcttcagcagaatttgaccaacatcaccatgtcgcgggaggcagacctggactttgcaaggcagtactacgagatgctttacaacacagctgacgagctcctgaacctggtggtggaccagggtgtgaagtacacggagctggagtacatccacgctctgaccctgctgcaccgcagccaaactggggtgggggaactgaccacccagaacacgaggctgcagaggctcaaagagatcatctgcgagcaggctgccatcaagcaagccaccaaggacaagaagataactaccgtttagcagggcgtactgcggttggtgacgggggtcccctcagtcacactcacttttttnccttggtatgttattgagtatattctgagcttagttttctctacagtgatactttagtggagaggaggtgtaaggattctttctctctggttttggcttttcatataaatgctaaaggaaggcgacagtacagagtgtttnggttgaacaactactttaatgcagtcaaatctaacgggactagggtgggatagggaggaaggtggtatcaaattgttggactctgaaaaacaagtggatggattactaatatttgatttattactcaatatatatataattccagccttggaaagtaggaaagtaggctgctacctaacttttagtcccttccaaaaccatttagtagggttctattacataaacagtagggtttttcctctcctgaccttatccgtttacagttcaatgaaataagtgtatgtgcattgctgtctgtctctattgccaaaatcaaataaatggcttctcagctgctgtttacaacaaacttccctaaccaaaacagaacctctaatttagggctaggaatagaagtcttttgatcccagtccntgggacagttttgtatgctgtatcttgtacacaggttgtaggttggtttattgccattttgttttatttctgctntataaaaaccaagagccagacaattagacaactatggaggaatgaaaggcaattcaaacatctgcttgattcccgccccgccacccctaatttctgagagaataatggttagagaacattgcatctcacttgaaacatcctttgggggtaaatgattcttaggtgctcacttggtctgagctcagctgaatgcagggaagatgggacagagtgacatttctcctctgtgcggcctccagctgagcctgtctctgaattgttccctcccccgcaatgtgggcacttaccatgttcctggcacactggacctcaccatgtcccccggtcaccagtcctcttgctgcccatggttcataggtcatagaaggcagcaatgcactgactgggccacatcttgaaaactcgtggaaagggaaaggggaggagatgggactttgaccacacacagtgatgcctcacaccctgaaggtgggggattttgtacctgtttgtacaactttggtcttgatgggaaaaatggagaattaaaaagtgttttgagaagcttaaaaaaaaaaaaaaaaaaaaaaaaaaaa

SEQ ID NO: 371 - DNA, 2386 bp, Homo sapiens
  modified_base (42)..(42): a, c, g, t, unknown, or other
  modified_base (578)..(578): a, c, g, t, unknown, or other
  modified_base (852)..(852): a, c, g, t, unknown, or other
  modified_base (952)..(952): a, c, g, t, unknown, or other
  modified_base (961)..(961): a, c, g, t, unknown, or other
  modified_base (981)..(982): a, c, g, t, unknown, or other
  modified_base (1477)..(1478): a, c, g, t, unknown, or other
  modified_base (1905)..(1905): a, c, g, t, unknown, or other
  modified_base (1920)..(1920): a, c, g, t, unknown, or other
  modified_base (1944)..(1944): a, c, g, t, unknown, or other
  modified_base (1952)..(1952): a, c, g, t, unknown, or other
  modified_base (2091)..(2091): a, c, g, t, unknown, or other
tttttttttttttttttttttttttttttttttttttttttnttcattcaagaagtatttattgataggtgctaggcaagatacaaagatgactcagacacagatcctgcccataaggagcttacagtctaataggggagagagaacacatacatggaatacatggtcagaactatgtttcagtaagatgaatctaacattgtgtataaagtaggctggagtaagaggttaagtgaagctgagagactactgaaattacataggtgaggaagaaagacgggaaagacttgaggtagaactgacaggacttagctgaagactggatgtggggaataacaaaaatggaagcagatgactcagactttagcatggatgatgtcatgaactgaaagaaggaacaagtttttgcaaagaaatgaaaatttcatataaaattcttctgcatagaaacaaactgtctgggatatactaggcacaatcaggaagaaatggctagttacccagaccaatggaagcacctcaaactggccagtgacttcctcccccttatatatccatccccccaaatttcccaacanttttctccactgaaatggtatagtgcctaaaatttattaaattcaaggtctatctccagacatggcctcccttgggaatgaaaacagaaatatattaagttattcaactcagtaagtttcatctaaagactctagttatgagtcactgtaccttctggtggaatacagagatgaactccctagtccttatcttctaggagcttacagtctagtaaagtagtaaaacagataatgtaattctaattctagactgaaggggtaagttatgaactangagaaagacaaagtgctctagaacagtttcagaaatgaaggttggaacaggacctcaaacaagagggaaaatgtggaaagtagatgagaatggatttgtntcctcactnccaaattctggacagatcanncccaaaacggggctactccccattcctgttgaaattttttcttaggaaaaaatatagctcttgtactgatcttttaaaaaattacttacatggcaagagatcagaggaaaggggggattgtagatctcagtggaccttcggggaagacagaaggcacttgaagccaaggaatcacaatgcctggcttatcgggaggaccctcagtgttttagcaaggctggagcatcacttccatgaagagtgggagaaataactcaaaagtaatattaagaccttgatataaacatggcattgccaggcactaaacagggtacacgcctaagaccaaattgctgccccctaggagcttacagttacaacaatacaaggtggaaaaagcaccacaatgtacagaatgcaaaatgctgaagtatttaggagaaattacagctgagtttcagctattaacacattaggatacccaatagctttctgacagctagtagtaaacccatnnctgaggggagcacaagttaatgtccttagacaacaagccctggtagagctgggccattaaagacagttctaagaaaattgagaaaacaggggtatgaaaactacagaagcaactgggtgaacatacaaaaagtgataccttccctttttctcctgacaaactttaacagggctgcccttcctacagtgaatctaaactgatgatcaccatattacttctaaaagcagatttgggactctactaaccaattctctctgatcctttgtaaaatgaaggggttgtacaagtcacttcctagtcctttccagcactaacattctatgattcaaagaattctgagagtttctctgttccttttggtaataaccaaaatagaagaaaaaaatttaagtctgatgcttctcactcaaaaatataattattttcnatataaatcacaaantgatccctatgctatcagctaaanttttactntccaccctatccttcttcaaaatccatgaattttttaaaaccacatgtcctacaagctaccttagcatgcaccaaatgatttttcaaaaagttttctcatctcctactcccttataccaacttcttggtataatgtcanttaaagggccaaatcagtgtacatccaatcttcataacaaaattttaaaatttaggagaacaactgacatcaaagcatgaggacagtgagtaaccgaagtggtttttgttgttttctaattttttgttttttagagacagggtctcactctgtcacccaggttagagtgcagtggtatgatcataactcactgcagcctccaactcctgggctcaagcaatctcctgcctcagcctcctgagagacggagactataggaatgcgccaccacatctggctcacttttcaattatct

SEQ ID NO: 372 - DNA, 3866 bp, Homo sapiens
  modified_base (8)..(8): a, c, g, t, unknown, or other
  modified_base (71)..(71): a, c, g, t, unknown, or other
  modified_base (109)..(109): a, c, g, t, unknown, or other
  modified_base (945)..(945): a, c, g, t, unknown, or other
  modified_base (952)..(953): a, c, g, t, unknown, or other
  modified_base (1047)..(1047): a, c, g, t, unknown, or other
  modified_base (1372)..(1372): a, c, g, t, unknown, or other
  modified_base (1415)..(1415): a, c, g, t, unknown, or other
  modified_base (1866)..(1866): a, c, g, t, unknown, or other
  modified_base (1984)..(1984): a, c, g, t, unknown, or other
  modified_base (2225)..(2225): a, c, g, t, unknown, or other
  modified_base (2295)..(2295): a, c, g, t, unknown, or other
  modified_base (2520)..(2520): a, c, g, t, unknown, or other
  modified_base (3090)..(3090): a, c, g, t, unknown, or other
  modified_base (3092)..(3099): a, c, g, t, unknown, or other
  modified_base (3225)..(3225): a, c, g, t, unknown, or other
gcgatctntagagaacagcctggatgaagaagtgaccatcgagatcgttctctccagctctggggacgagnactcccagcatggcccgtactgcacagaagagctgggnagccccacagagaagcagcgcagcctccccgcctcccaccggagcagcaccgaggccggaggcgaggtgcagacctccaagaagtcctacgtgtgtccgaactgtgggaaaatcttccgctggagggtcaacttcatccggcatctgcggagccgcagggagcaggagaagccgcacgagtgctcggtgtgcggggagctgttcagcgacagcgaggacctggatgggcacctagagagccacgaggcccagaagccttaccggtgtggtgcctgcgggaagagcttccgcctgaactcccacctgctctcccaccggcggatacacctgcagccggacagactccagccggtggagaagagagagcaggcggcatccgaggacgcggacaagggtcccaaagagccgctggaaaacggcaaggccaaactgagcttccagtgctgtgagtgtgggaaggccttccagcggcacgaccacctggctcggcaccgcagccactttcacctgaaggacaaagcccggcccttccagtgccggtactgcgtcaagagcttcacgcagaactatgacctcctccgccacgagcgcctgcacatgaagcgccgttccaagcaggctctgaactcctactgagcctctccgcctggggcggcctcaccctggctggtgctgccccctcaccttggtactgatcagcgcccccacccaggacataccttccccaggatagagagcacacctccctcctgtccttgctctcaggtagtgagcgttcgggtggtgccatgggagcactctccctcccccaggtaatgaaagagtggccaagtgantgttctnnttctgctgtgccaaaaaacgggggggatgtgccatcaccaggttggacatgccaggtgttctgcgtcttagagacccttggcccatgctccccnaagctcggggagtaaaactgggctatcccccgtcagggcggcaccctggtcaccagccaaacctcagtatactccctcccctccttccctgtctgaacgctaggatctgctcctgaagctccaggatgcctgcacttccactgagaagctgctggcggatgttggactagaggaaagaagaaggcagggtgggactgatgggctcagtggggagcagggccaggcacactgagccagacatgtcatgtctgagccccagattcgtggccatcaggtaggcaggagcaccccgcagatccaagatgatcaggcagcccttttgggntggcctctgtggcaggggtctgcagagctccttcttgaggttnggaaacagtcgtcatacctgttgattttcctgggggccaatcactagggatctggagctcaccaaaaacaaagcttacattttaatttgtgttgcacacctaccccataatgtctttataccccaaagatccttggtaaatgcttgtgggttggaagcggagttgtcatcgtttaaaaggcacttaagtcccttcttccaatctgtcctgtctaggaatgtggagctctgcccccagtgaggggttctcctgtctgggtgagccaagctccagaacagaaccttgcctgacaacacacttgatagatacattagcttggagtgctggtgtgtccaaacactggctggcttagaacaacaggagtgtattccctgacagttctgggaggtgcacgtccaagatcagggtgtcctcagagttggtgccttccgagagctgtgagggagaagcngcttcatgcctttgctggcagttgccattccttggtgtgtggaagcgtcacccagtctctgccttcatctccacatggcactcttgctgtgtgcgtgtctgtctccaaacctcccttngtttaaggacaccagtcatatcggattagagcccatcccaccgactccagtataacctcatctgtatccgcagcaaccgtttaccaataaggtcacattctgaggtactagaggttgggacttcaacatcggaatttgaaagggacagcattcagcccatgactccagataaacgtgaggtatgctatatcattcctaatttacagatgagtcaatacaaacttgagtgagcttgctcacnaattccatcaaaggcagggttcagacccaagtttcagcatttagggcaggtgtcctctgcatggaagaancatactcaatagccgtaaacgctgacaaattccccttcctccctgccttctgatgggggctgggcaggccagctggagctgtgtctcctgctgggattccggactgagagtgacagcaggtagtgaaacctcaagcaatttaaaacatggtattgttcctggaagactggttatgttggctagggtcagcaagagagggcatcaaggctgtagtctagcagtganttaatctgcaagtcaaaccagacgggtattttgtattattcatatgtcacatcctaccaacagacagtaagtcaggcaaggctcctggtgctccttgtcactcacgtaattttcacatcaggaaaactctgggctgggtgcagtggctcacacctgtaatcctagcactttgggaaaccaaggtgggtggattgcctagctcagtgacaccagcctgggccacatggcaaaaccccgtctgtaccaaaaatgcaaaaaattagctgggtgtggtgttgacgtttgcggtcccagctactctggaggctgaggtgggaggattgcttgagtctgggaggcagaagttgcagtaagccgagatcatgccactgcacaagctaggtgacagaatgagactctgtctcaaaaataattaaaaagcctctgccccaaactcgttaaaagattttataaccacaactgctgtttctgtgtagatgcatctgcatgcccaggagcagtaaatgcaataaaatcatttggttatactttgaacacaaaataaacggttgaggcttttactttctaaanannnnnnnncttgtatcaacatagctggaaaagggagaaatccgatttttaaggccaagggaggggaaaattccaagtagaagccaggctctctgtacacgtttaccccacctacctgtgtgctcctacctgtgntgaggattctctctgtagctctaaggtcttgggaaggttattcaccttcctgcttcagacgtctgactcaagagaagaacactgttctacttaccagagtgtttttctgtgtaaaaccacatcatgaaggagaaagcgacaaagggaatgtgaggggctggaagccacagggaggctgtctcttgagtccccaccactgatccagagccaaccaaggcacctcaggaaatggaaggccacattgcctctggatttggaaatcctcctgggtaatgtaactgaaacccaggttgatgccatgcagcaggagcagcagggggaacgtgctctcaggagaggtcggccaaccctccagcccaacacccttcaccacagtggtggaggaggctgcacccaggagatctttgtctcccttttggccactgatacctttggccttatctgacaacagctacccctcgatccttccctcccaccccaggggctgggcagctggctggagctttgtgtccaccttgctctggaggttgagacccccatctgagcaacatcctctctctttgttcctctgatcccttggcatcgtcacaaacccacaggtgcataataaaaacttgctgagtcaaaaaaaaaaaaaaaaa

SEQ ID NO: 373 - DNA, 3450 bp, Homo sapiens
  modified_base (15)..(15): a, c, g, t, unknown, or other
  modified_base (34)..(35): a, c, g, t, unknown, or other
  modified_base (134)..(136): a, c, g, t, unknown, or other
  modified_base (1018)..(1018): a, c, g, t, unknown, or other
  modified_base (1079)..(1079): a, c, g, t, unknown, or other
  modified_base (1357)..(1357): a, c, g, t, unknown, or other
  modified_base (1424)..(1424): a, c, g, t, unknown, or other
  modified_base (1448)..(1448): a, c, g, t, unknown, or other
  modified_base (1838)..(1840): a, c, g, t, unknown, or other
  modified_base (1842)..(1848): a, c, g, t, unknown, or other
  modified_base (2308)..(2308): a, c, g, t, unknown, or other
  modified_base (2325)..(2325): a, c, g, t, unknown, or other
  modified_base (2332)..(2332): a, c, g, t, unknown, or other
  modified_base (2337)..(2337): a, c, g, t, unknown, or other
  modified_base (2347)..(2347): a, c, g, t, unknown, or other
  modified_base (2441)..(2441): a, c, g, t, unknown, or other
  modified_base (2443)..(2443): a, c, g, t, unknown, or other
  modified_base (2452)..(2452): a, c, g, t, unknown, or other
  modified_base (2459)..(2459): a, c, g, t, unknown, or other
  modified_base (2469)..(2469): a, c, g, t, unknown, or other
  modified_base (2502)..(2502): a, c, g, t, unknown, or other
  modified_base (2526)..(2526): a, c, g, t, unknown, or other
  modified_base (2538)..(2538): a, c, g, t, unknown, or other
  modified_base (2824)..(2824): a, c, g, t, unknown, or other
  modified_base (2859)..(2859): a, c, g, t, unknown, or other
  modified_base (2871)..(2871): a, c, g, t, unknown, or other
  modified_base (2873)..(2873): a, c, g, t, unknown, or other
  modified_base (2881)..(2881): a, c, g, t, unknown, or other
  modified_base (2911)..(2911): a, c, g, t, unknown, or other
  modified_base (2942)..(2942): a, c, g, t, unknown, or other
gctcgactttttctnttttttttttttttttttnnttgatattgtgatttttaagttttattgattaaattcaaacttttttatcatttacacaaagaaactgtgacagactctgagaggactaaaaggcatcnnnttaaattttaacatgcatttattaaatttatatgcagatgactacactactgcaattacagaaatgagtaagaacatactctcaagatcttacagtcattggttggggtgaaagtatttcttctgtcttcatgaaaaattaaaaagatagaaaatcttgaagtattttgctaccttaaaacaactacccaccctacatttgtactaaaataggcttttgcttgttttaaaagcaattctagatgaggttatatttttacaatactgtatctcatctcaaataaatttatacattctttaccctgtctaaacttgcatgcaaaataagaaccagcaagccttcaaacttcaatcacagtattccataggctatattttaagtctattgcattagttgaaatttattttgcagagtatgttaacaaacatattctaacacttaaaaaatcattacaattttttctgtttttgtcttctaaattactctgagcagtgaattactggagggaagatacccatgtctaaaatttgtgtctggtgccagtctcagatttctgccaaacaccagtaggtattcaaaagtgtggtccctttaaaacagcaggccggatatcacctttctgtcttcaaagattcaaaccagactcccaatctgggatttctctacagagggttggctgcttcccagttaatgtgagttttgcaaagtttgcatttcatgaaaacagtgttgtgtaaacatatattgtgtcactttacctactatttactaaaatcagagagtttagcctttgaaatttatggttctctggagctatcataaatcaatcagtcatacgaatggactagctgtagactcaggatatcaataaaactaggcagntgaaatttgcctataattatactatatttagattaatagttatcaaaaacatttttccccnaaaaaatacctcaagggtaaaacagaatggtaaagtttttttcaggataatgaattttcaaacatttccaagaccataaccagccattttaagtactgtaaactctgttatatttcatttggataagtatctaataagcaattattacatatcctctcatttaaattaccactgaaaactagaaataatctttatttaatacgactgttttaacaccatatggaacgggaaataactaaatgaaaattgttcacgtaaatgtgatgggaatgggcggnctgcgggagcagtatttcttgacatgtggcatgtcactcaggaaagtaaaaggcccatcatatccanaatgccagcttggatattcccttngccacccacttgacgaacagacataccacatggcattaaatgctgcaacctttcctaaaaatgccacttggattggtccgctgtggtgagtatataagaactcttggtctgtctcttgagtctgtgagttcaaagggaagaatctagtaaataacaccggctaaattttgccctcagatgtttggcataaatgatttgtgaggatattggaacctttggctgttttcacaccaatgaaataaattatgctacttgaaaaaaattctacagaacataatgctacacagtcacagtcgactttttgcaaaagtaccagagaatatcttttagaaacagtgcttataaagccccatatactccttagatatttcccaaggatttcttctcttnnntnnnnnnnaaacaatcttaatattttatttattcttcataaatacaatgtatataatataaaacactttgtgcacatgtttccaacaatttcattttctatgcatctttacataaggtagtagctaataactctttctgtggacacgtattttccagttttctaaggtttatgtgttcaagcattgtaaaaacatatttaaaaattgaattaccagtaaaaatattgaatgtacaggtcattatgctcccacaaatacaaaatacattgaaaaattatatcaacagataattacatatgaaatatgaggcatatattttcttctattatttattttctccctaaagagttctaattgattaaatctcaagagacaaaatgtaattttataaaacaactgtattgttcagatttaggagacaacctaagaagatgattctgagtaggtaggatttttgctattactgtnatgtgaaaaagactgcncaattanaatgnacagattgtnacatatctccctaacaagaggggcgaactgatactacaagcagccagaacaacataattagaatagaattccaaggttatattaatagagtaantnaagttaatntaaaacnaagatcaacntgagcttctatttacaccagttcagacagcccnaagaggaaaagaactctattttangagacatatgtnactctttgagcttctgtcatccaggtgccatttctgatgcagcacatgtgcactgaacagttggcaaagaaggaaaaagattatggtagatgtatgtgcagatagtctctctaatgatgtaaaatacgtccagaaagaaagcagggctttgttgtaaaataaaaaatttcccatgactttttgttctttctgaatgtgatttgagcatgtttctgtaaataagaatatatactaacttatgatgtatatagaacaaaaatagacttactcatcaggaagtgatggnattatacacataaattggcaatgacatttgaaaantttaggatctgntnccatttcntctaaatgtaccatgtatagggtggctgtnaaagcagaaagatatataaaagtatccagtngcacatactatactgcattgctaggtaaggttcttttcctgacatcctatgcaactatcaaaaatcatatgtctgcaaactgaaaatattagcagaaagaattaaagatgttacagtttcagtattgaaagttttggtcccaaaaggtgctttcgtaaagttatttctctttcatgcattgattgttgcttagctaatcttcatcttggtccagatcagggtcaacatccgtggtgagtctttatgcctattgctgttttctttgcttctgcttttaatttggttgctcgtaaaataggtttagtttttttataatcctgtttaccaatttgttttctgtactgatcaacaggaagttttatagtagcagcatcttttctacccatctttgatctccaaaatgcctcagctctgccaaggcaagggccgacaaacttcgtgtcctgtgggaaatgttgctgtccacggttctgtcactcaggggcaggggcgggacaagccagccgca

SEQ ID NO: 374 - DNA, 4654 bp, Homo sapiens
  modified_base (310)..(310): a, c, g, t, unknown, or other
  modified_base (343)..(343): a, c, g, t, unknown, or other
  modified_base (512)..(512): a, c, g, t, unknown, or other
  modified_base (528)..(528): a, c, g, t, unknown, or other
  modified_base (664)..(664): a, c, g, t, unknown, or other
  modified_base (1491)..(1491): a, c, g, t, unknown, or other
  modified_base (1493)..(1493): a, c, g, t, unknown, or other
  modified_base (1612)..(1612): a, c, g, t, unknown, or other
  modified_base (1650)..(1650): a, c, g, t, unknown, or other
  modified_base (1950)..(1950): a, c, g, t, unknown, or other
  modified_base (2035)..(2035): a, c, g, t, unknown, or other
  modified_base (2063)..(2063): a, c, g, t, unknown, or other
  modified_base (2107)..(2107): a, c, g, t, unknown, or other
  modified_base (2114)..(2114): a, c, g, t, unknown, or other
  modified_base (2245)..(2245): a, c, g, t, unknown, or other
  modified_base (2257)..(2257): a, c, g, t, unknown, or other
  modified_base (2263)..(2263): a, c, g, t, unknown, or other
  modified_base (2265)..(2265): a, c, g, t, unknown, or other
  modified_base (2269)..(2269): a, c, g, t, unknown, or other
  modified_base (2274)..(2274): a, c, g, t, unknown, or other
  modified_base (2292)..(2292): a, c, g, t, unknown, or other
  modified_base (2297)..(2297): a, c, g, t, unknown, or other
  modified_base (2299)..(2299): a, c, g, t, unknown, or other
  modified_base (2302)..(2302): a, c, g, t, unknown, or other
  modified_base (2309)..(2309): a, c, g, t, unknown, or other
  modified_base (2855)..(2855): a, c, g, t, unknown, or other
  modified_base (3119)..(3119): a, c, g, t, unknown, or other
  modified_base (3365)..(3365): a, c, g, t, unknown, or other
  modified_base (3480)..(3480): a, c, g, t, unknown, or other
  modified_base (3501)..(3501): a, c, g, t, unknown, or other
  modified_base (3922)..(3922): a, c, g, t, unknown, or other
  modified_base (3958)..(3958): a, c, g, t, unknown, or other
  modified_base (3985)..(3985): a, c, g, t, unknown, or other
  modified_base (4133)..(4141): a, c, g, t, unknown, or other
  modified_base (4624)..(4624): a, c, g, t, unknown, or other
tttgctttatttttttccttttctcttttttttttttttttctctttcctttttttaaatttaaaccattgagacttcagaagagcaggacacaatgctgtggacaggcaccaatttctttaaagaaattcaatgtgggcaaggcatatgtgtaaatttcacttttactttttataaggggttagggagctatttttggttttgtccttcactttccctctgtcttccttctttatacttttctcagttctacttatgacacctcacttccctagagaaggcctgcctccccatagggaatctgggggtntcttctggaacggggcgtgaggacacaaggagncctctgggccacgcctccctaccagatgcaggaactcctggactccttggtgggctggccctggctagcccttgggcctcggagatgatcagaggtgaagaaccgcctggaagaggaaggccagggtttggccaggagaactaagaaggtctcaactccaggctttgtngtgtttaagctattgngagccccaggccacaccaggacttgcagtggtgggaatccattcctcttctgccctgtgttgcagggaactaggaggtaagggtggagggcgaccatctcgctcttgctggcggtggagcagccatccctgccttnctgttgggaaaaactgttgtgccaaactcttgtgtggaacacagctgggtcttcagcaggcatctgtcactgccgtgaggtcagcgcttctcacctaactgcctcctggattgtcatcttcccagatgtgtcccatagtgtccaggtgtcacagagacggcctgaggccctaagatctggttgtgactttgccatgataacagggtgtcctgaactggctgccgttgtcgtgttctcacagtgaagggcgtgccctgtgtgccggggtccatggtgtcatatgcagtgacacacactgtcaagcgccatttccctcacccctggagacttactgttaggtgcctgccctcagtatagacgtatccaatgggaaaacagcggacctgcccagagcagggaggtgtcgtggaactgggtagaccccctgcagcgttaggggcccatttgtgggctcgccaccttcaggcttccccagccatgacacttcagccccgccacccatgcctgtctgctgcagccatccttgcactctccagcgacactctcgcacctccctaggggaagcttccctccccctgggctgctgctctgagcccgtctgttctccccctgcaagaaggggcaatgctcttgtgttgtccctctgtctggacgcgcctggccactccgaaggcttttcaccccattatggccaaatagtatagggccactggggagggggaagggaatcattttgtgttcatttttgttttctgtttcacctaaaccagcataggattgataggggagacggttggcgggcatttccgtttctatgtgactatgtnancaaggcagcaggggcttttacctgctaggcggcagtcctttggccctgagaatttgggagagaacagtgcatcaggccaggctcagcaatatgtttgctcacattctttcagccttctntcacccccctcaacaccaaactttcttccttgtgagcngaaggttggctgctgttagcaggatcccacagtgataaccaggcccttcccttcctaagccaaaacccattgtgactgcctgtctctcctgtctctgacttctcaggcagcctcctgagtgcactgagttgtatccgagagggtgggaacagcagcatcccctaattgcagtacacggttccttttccgcccgccaccctgcctttccttgggggcagctgtctctctgtacatgagcaaatgggcaaaaacagtccccaaacccagcacccccctctccctggctgcagcccacactgnaacatccctagtgaggctccagcctaatgagccccttattttctttttcttccctccccaggtctcgtagctctaactaaaaagntcttggagccatcgtgctccccctttgntatttttcttgctatcagagtagcaagaaacagcacccctgtangtgacangtgggcagcctggtaggggtcgccagcctccatgccccctcatcttccagttcttgcttagtggcacgacctctttccatagcataaatgcaggccagcgttttagccccaagtgcctgcccttgcttctnacccctcccctnctttcncnaaanacttncccacctcaggcactcancgggncnccnccgtggntgagagaactggccgtggctcagccccgggtagcacctgtagtttcagtgccactctccactgtccccttgtggaccagcttccactcactgtcacgtcccccctcctgcgtcttcactgggtctcaggctgccagcagctctctggtgcatcgtctcaacaccaccaagtttgtaggacctgcccaagttctagtagtattcaaaacttcaaacggcagtcatttgttctcctcggctctgtggcaaggatagccctttggagggggactcttgacctcggctgttagggatctgaacttggttttcccgtcagaagaatcagcaggacagatcgtagtgccttattccattgtcctcccctggccaggcctcctggctcagctggaagtgcatggcttctttctccctatctgtgtcctctgtcacttgctctttcactctctctctcattcccagagagccacgggggagggatcaccctcacccccaacaccctcttcctgagggctgtagccaggtccgcatctccccaccaccaccaggncactcactcgcagctatagcccaggacagaaaaactgtgctttggacaggtgcacactctctgcctcttacctctagccaggaggatgcctcagtctgttcattcgagactggccccgtctgaaccttctctgggcactggggactaaggttgcaggccttagcctcgtctcgtcccagaggcattgggtcaggagaatgggaatttttttcctcccacctggacatagtttgcccctgtggctgcctttctgagggagtatantaaatgtttacttaagaaacaccctgtttacagccagaggagaaacacccaacactgagtggagatttgactctggacagggcctggcctccttagtggcactgccggggggccccagagcgaatgagggcagagatgcccggggcaggggcaaacgccctccgctccctctgctcccaaccctgtggtgctaggaccactccccgccttccctacggcctcctcgccctgcacattccccacctncacattcccctcctccaagatctcagctccttaacatatcagttgtctcctagcctagaaaaccagtgtttggagcaataagatgattatttttgcttgaatctttttctaaganaaggaaaagagctggcattgngggaattttctttttatgctgttagctgtttaccttcttagaagacatcctaataggatggatgtctgggttttagccttggggtatcttttggaaacttagaaaagcaggagtcaggctgccaccccctaaggagggaccctaacgttctgcccttgcctggttccatatggctccttccagccctgcccaccaagtgcagctcccactttccatcctgcccatacgcccctcttcccccgacatctgggggcgctggtggcacttactctaggttggtctcagactatccctccccttggctggttttccctcctaggcctgtctggcagcccccagacagacgtagctcctgggagtctcggccctggcaaccttggaagagccaagctgacattgtttagctcttcaggccactggnttttggaggcagaagtccagagatactggctctgcnaagctgtcgtactgggctgtggcacanccttcgagacaacacgggtgtatctctgatcctgccctacctaggcttcaaggggcttctgtctggagaaatgccctcaaagggtaaccagtaggtgtggcattgaattggccagtgttagcatctacagccatcaccgagatgagtnnnnnnnnnttgcctgcccgagggccccctaaggttatagacggtatcagcagggaggccgtcccgctggttttctaggagagcccacaggaggaagggagcctcttcaggggcactggaatcttttgtgccaggggcttcttttcatcagagccggggagtacattgcagtgacttcttaaacatttgtgtgggacagacgagcgtgagggaggttttaagccaggcacaaagttagtttccaatactagttaataaatctatttttcttcatttcctttttttgcacagaagctggtaatctaggacctacgtgtgaacaactttatatgaatattttttgtacttggtttacttgggttggtatgatacattatatttaagttccttgaacactgtggatcccctaatgtgtatgaatgactgaggctttgtaaattaagggacgtttgtgtgaataaagttatttgatggggtcaaagaagccatatntgatttgaaaaaaaaaaaaaaaaaaaaaaa

SEQ ID NO: 375 - DNA, 1692 bp, Homo sapiens
  modified_base (4)..(7): a, c, g, t, unknown, or other
  modified_base (29)..(32): a, c, g, t, unknown, or other
  modified_base (687)..(687): a, c, g, t, unknown, or other
  modified_base (1138)..(1138): a, c, g, t, unknown, or other
  modified_base (1158)..(1158): a, c, g, t, unknown, or other
  modified_base (1172)..(1172): a, c, g, t, unknown, or other
  modified_base (1573)..(1573): a, c, g, t, unknown, or other
  modified_base (1681)..(1681): a, c, g, t, unknown, or other
ggtnnnntttttttttttttttttttttnnnntttcagctaaaacgtttatttctcactcaaaacttatttcccctcaaccctatacccaaagaagaaataaaatcacagatacataacagaagtatttgaggtaccctctcatatatgcaaacaaatgcagactaggcctcaggcagagactaaaggacatctcttggggtgtcctgaagtgatttggacccctgagggcagacacctaagtaggaatcccagtgggaagcaaagccataaggaagcccaggattccttgtgatcaggaagtgggccaggaaggtctgttccagctcacatctcatctgcatgcagcacggaccggatgcgcccactgggtcttggcttccctcccatcttctcaagcagtgtccttgttgagccatttgcatccttggctccaggtggctccctcagtctggactctaccacttgggtctccagattttctgttacgtccttgtgggtcaggatatttctggaagtcactccgtgaggctggtaatcctcagacccagcttctggtcgactctggaatggactgaagctgggcaggatgatgagagccagggaaaaaagaagaatcaaaacacaagtgctggtctgggcagctttgttggaagtttgagcaattagcgtctgcagctggcggagntgagctaccaaggagatgttgtgcctctccagctcctggacttttttctgtaattcttggttctgtgcagaacaggctgccaccctgctctccagcccatcaatgtactccttcttccgccgccgactgtcctgagctgactgcttgttacggattttcctcctgaccttcttgaggaccctctcctctgccttggtgaggggcaggtgagagggcagggaaaccccttcctgccccagcagacgcttctcctcatcggtcaggaacagggtttgacagggcagcagggttgtacagggcactggggctacggtgcctgctctgggcaggatgtgggcatgagcatcaaagggcagctcactgaccatgcaggaatcaggcaccataaatgctgggctccactgatctagctggatggagataaggcctacatttggcccagtttcccccntgcatcctctccagggcccntgcctcatagacancctcatagagcataggagaactggttgccctgggggcagggggactgtctggatggcaggagtcctcagagatgccactgtcactgccaggagatgcttctgagcagtacacctcattgggatcaatgaaaagcttcaagaaatcttcaggctcactctcttgaaggcccggaacctctggaggggggcagtggagtcccagctccaggacggatcctgtcgagaagatatcctctgggggctccagccacgcgtccagcaggtcagggattccgagatccatgcttcttgccaggagccacggtagggccgctgtatctgggagtaggggactaagagtctgagggtccacaaacggaatttaagaagtaggtagccgcgccctttctgctgcagttttntcttagctatagtaaatcttcctgagggtttggtgtctcctagctgaagaacagaaaaggctgtgactggagcacaggactcctgaatgcctgttctgtagccctcgnttttgcaagag

SEQ ID NO: 376 - DNA, 2061 bp, Homo sapiens
  modified_base (696)..(696): a, c, g, t, unknown, or other
  modified_base (798)..(798): a, c, g, t, unknown, or other
  modified_base (801)..(801): a, c, g, t, unknown, or other
  modified_base (821)..(821): a, c, g, t, unknown, or other
  modified_base (882)..(882): a, c, g, t, unknown, or other
  modified_base (1080)..(1080): a, c, g, t, unknown, or other
  modified_base (1368)..(1368): a, c, g, t, unknown, or other
  modified_base (1372)..(1372): a, c, g, t, unknown, or other
  modified_base (1376)..(1376): a, c, g, t, unknown, or other
  modified_base (1380)..(1380): a, c, g, t, unknown, or other
  modified_base (1412)..(1413): a, c, g, t, unknown, or other
  modified_base (1426)..(1427): a, c, g, t, unknown, or other
  modified_base (1460)..(1460): a, c, g, t, unknown, or other
  modified_base (1465)..(1465): a, c, g, t, unknown, or other
  modified_base (1467)..(1467): a, c, g, t, unknown, or other
  modified_base (1481)..(1481): a, c, g, t, unknown, or other
  modified_base (1491)..(1491): a, c, g, t, unknown, or other
  modified_base (1495)..(1495): a, c, g, t, unknown, or other
  modified_base (1509)..(1509): a, c, g, t, unknown, or other
  modified_base (1519)..(1519): a, c, g, t, unknown, or other
  modified_base (1558)..(1558): a, c, g, t, unknown, or other
  modified_base (1568)..(1568): a, c, g, t, unknown, or other
  modified_base (1612)..(1614): a, c, g, t, unknown, or other
  modified_base (1620)..(1621): a, c, g, t, unknown, or other
  modified_base (1625)..(1627): a, c, g, t, unknown, or other
  modified_base (1637)..(1637): a, c, g, t, unknown, or other
  modified_base (1648)..(1649): a, c, g, t, unknown, or other
  modified_base (1656)..(1656): a, c, g, t, unknown, or other
  modified_base (1831)..(1831): a, c, g, t, unknown, or other
  modified_base (1918)..(1918): a, c, g, t, unknown, or other
ttttttttttttttttttttcaaatggaagaggcttttatttgtaaagaaatgaacttacaactgatctacaatatattattgtaatataaacaatataaataaatgatcctgtaggcccactaatcttccatccagacccacatgaagcaatgttacaacaatattctatatgaaaatgtgcaggtaacaaaggtgcaattacaagcaagttaagcagcagagtataaggtgctttaatttaatagttaatgttgccatcaacaaacatttaaatgctcaatttacttcactgaatacagacacaacaaatatgaaaatctaaattcatacacatgctacttaatatgaaagtgctttctcttttttaaaaaaatacaccaaatggacactttttacatagatcaaatgtgctcttacaatgcaaaattaaccttcattttcaggttatacattttaaaactgtagctatcaacaccaatctaggaactctaatgctaagagtgctaaaaactatttcatttcttgtaaggaggactctaatacaatatccaatgtaaagaatacatctatatataatcttaacatgttttctgtaaagataaaaaatgttttctttccccttggtgatctttgttcatcctgggtggatcatcttttgaggttttaataatatgaaagtcctattttagaacantgggaggaaccaaaaggggaattaaaaaattggttaacgtgtgcttgaagcatccaaaaaacaccagtttatcacaacaattggtctttgctaaaattaacnaanttttaataagcaagacgacnaaaagtactaatttaaaaggcttgaaatgcctgccaccattgtcagtatccatccatccanccttcatttactacaagcacaatactactttgaggatagtttttggaacttattttgacttttttccctataggaaaaacaaagaccaagcttttgaaggagaggactgggaatctagtttaaatgtctacatccaaaattatatcatctttgcgcattcagttgactttttaaaatttaagaatacatatacaaaangtacttatggaatacatattttaacagcataacatatttgaagaattagttacactttaaaaattaaaacacttgaaaagtattttttaaaccagtaccatggaataactttttgaaacccagattatctggctacttagatgatagtcttcctgttttcaattagtttgaaagattctaatatagattctaacccaacagtttatatggatattttcctgctttaaaaagctgcaacaggctaggcgcagtggctcatgcctataatcccggcactttgggaggctnaggngggnggancacttgaggtcaggagttcgagtccagcctgnncaacatggtgaanncccatctctactaaaaatacaaaaaactggccnaggcntnagtggtgcatgccnagtaatcccnagcntacttgggaggccnaaggtggganaatctattgaacctgggaggtggaggttgcattgagccnaagatcacancgctgcactcaagcctgggtgacagtgagactctgtctcaaaannnacaaannaaannngctaaaacantgataaactanntttaatnagatattttcattctatatctttatggagaatgtcagtatcaactgatgttaacaagtaaagctttgtcaacaggaattacaatgtgattcacagatcccagaatgacaaggaagggaccttaacccaataaatgattctcccattcaatgtttaccccctagatacttaacaantcaagcatggaactgtttcatgtttacccgttctacatttaaaggatgcccttttactatatatgtgctttctagaatattactgantcttacatatctttaaaagttggatatttgtaatagcttaaagtacagtaacacttattttgtgtaatctttcttaatttaaaaacaaaaaataaatgaacaagtcagttccaatgatctcctttgagatttttcagttttag

SEQ ID NO: 377 - DNA, 756 bp, Homo sapiens
  modified_base (33)..(34): a, c, g, t, unknown, or other
  modified_base (37)..(40): a, c, g, t, unknown, or other
  modified_base (42)..(43): a, c, g, t, unknown, or other
  modified_base (166)..(166): a, c, g, t, unknown, or other
  modified_base (681)..(683): a, c, g, t, unknown, or other
  modified_base (685)..(686): a, c, g, t, unknown, or other
  modified_base (688)..(690): a, c, g, t, unknown, or other
  modified_base (692)..(695): a, c, g, t, unknown, or other
  modified_base (697)..(697): a, c, g, t, unknown, or other
  modified_base (699)..(705): a, c, g, t, unknown, or other
  modified_base (709)..(709): a, c, g, t, unknown, or other
  modified_base (711)..(711): a, c, g, t, unknown, or other
  modified_base (713)..(715): a, c, g, t, unknown, or other
tttttttttttttttgaaggaaataagaggagnnttnnnntnntacgttcattcgttatttatttgtgtgcgaccccggctccccgcagcctccacccctcccgcgtcccgctttcagaaggaacgcggccctcagctccctccgaagaggccccgggtcaggggntgcagccgggtccccgtgcgtcggcccagctcgtccagcaccgccttctccttctggaacatctgctgccactctgcctccgtgccgtgtgtgaatcccagcaagtgacagagtccgtgggtggccgtcacagtcaggacgtcattgtaatcttcattttctttacactgatggaagatatactccactcctaggaaaatgtctcccaaattgtagtcatctggaaaatcaggctggggaaattcacctgctttcagatgctcatgaaatggaaaagaaagcacatcggttgggacatttctatctctgtagattctattaatgtgctgaatattcttgttgtcaacacagatgatccccaggtcaaatttctgcactcctaaaatcctccttacaatctcgatcttactgcgaagtggcgctctcctgatggggatgactcgctgcagatttctaatcaccaaactcatttcaggaagaataaccagccctttaaaaatgtttgcaacggaacnnntnncnnnannnngnannnnnnncgangntnnntggaaggatgccgctggaatccggccagaagactccagcgg

SEQ ID NO: 378 - DNA, 2663 bp, Homo sapiens
  modified_base (155)..(155): a, c, g, t, unknown, or other
  modified_base (175)..(175): a, c, g, t, unknown, or other
  modified_base (186)..(186): a, c, g, t, unknown, or other
  modified_base (193)..(193): a, c, g, t, unknown, or other
  modified_base (224)..(224): a, c, g, t, unknown, or other
  modified_base (292)..(292): a, c, g, t, unknown, or other
  modified_base (309)..(309): a, c, g, t, unknown, or other
  modified_base (383)..(383): a, c, g, t, unknown, or other
  modified_base (858)..(858): a, c, g, t, unknown, or other
  modified_base (1484)..(1484): a, c, g, t, unknown, or other
  modified_base (1486)..(1486): a, c, g, t, unknown, or other
  modified_base (1488)..(1489): a, c, g, t, unknown, or other
  modified_base (1492)..(1492): a, c, g, t, unknown, or other
  modified_base (1496)..(1496): a, c, g, t, unknown, or other
  modified_base (1563)..(1563): a, c, g, t, unknown, or other
  modified_base (2261)..(2261): a, c, g, t, unknown, or other
  modified_base (2263)..(2266): a, c, g, t, unknown, or other
  modified_base (2268)..(2270): a, c, g, t, unknown, or other
  modified_base (2273)..(2273): a, c, g, t, unknown, or other
  modified_base (2275)..(2275): a, c, g, t, unknown, or other
  modified_base (2277)..(2278): a, c, g, t, unknown, or other
aaatatctgaaatacagaatacgaatttaataaaggaagcctaccttatgtaaattatgatgttgaaaatgacagtcaaccagagtagatgaagtgtccttatgaagaattattaaatagtagctggatggatctttagatggatgaccacctgnaccattccaggacaattttnggtcccatttngaggatngccatagttgcaagtccttaggatcttcctngttttaaaaaactatcaaagtaggttaaattaaaatctaatttaaattaggttaatttatattacatngtagatcattctttttncccccctctttcacttctaaatattttgctttctaaatactagccttctggttcacagtgaaataatttaattntcaatcagtagattgattccaagtggagaattcactgcttccctaaaatgcgtttttcttacctgtaatggtgaatatttacaaggatctggataaagagattttgatttttgaaatgccacaaaaccccttaaagtggtcaagtacctaaggtagtggctaaggcatgcttgaactgtgtttgagagacagcagttcagtcagtacataatttgttggtgactaacaaagctcacatctgggagattaactttttttaacgcaaaaatattctgcacattacccatatattgttgaattttacatacaaagcattttgtgctttcattcaattagtttaactatattcagtttctgtattatttctctctgatctatcctgtaattattctatactttagaagaaaagatcagttcatattgttagactgaataattctacatgaagttaaaagttagcaatttaaaaaatttngctgcataataaagataattatagttacatgtattgatttaagtctcacacactgtgctaataagtcctttgcacatattattggattctagagcaaccctaggatttgggtactattatttccatttgacagatgaaaaacctaatgcatagaaagataagtagaccagtcaaggtctacagctagtaaaatgctcagattgaaacctaaatcttttctcactcacttttaggttctatatgctattctccttacgtaacgttaaatagatcctttagtttgataggttcattagttttgcttaatcgttgcttccaatatgattcttattgtagtatttatattacaaagttggcatacagggtcaatatctaatttactgttgtgtttttcttaatatgttcaatgtatggtcatactttttaaatttgattttttaaatattataagtggtcatgaaattttaatgttaagtttgtacctaatagaaatatgtctatcacaaatctttattggtattattttatatacttttccagcttgataattttcacaatagaaagagaccaaatattttgtactatattttgtgacatagaagtaaatgacaactctaccttggaananannaanaaancagtgtttttatgttcaaaaactattttaaatgtcataggcttgccaattgtgttaactatttagtncattggtagtttttaaatgactaatgctggagtgaaaatgtaaggcaaaatatttagtatattaacagtagatagtcattttcatgtaatcagaattgcatgttaagggttttaaaagctgtcataactcttaccttttatttctaccagtgatcaatcatttctctttacaaatttagggaggaaacaactgttcaaatgtataggggacagaaacctgacatttagagaacagaaattttaattgccaaattaaagcagctaggctgcccctgggcttaacaaaattcctatttttgaactagacccgaggtattttatcattattatttgataggtaccattaacctttgttttgtgattatcgacttttggggggaaagatgagtaattaaacacactcgcccattttctaagtggtttagaaggttgcagtctgcctcaccatacaaagccagtttaaataggaatatatcacatcatacttcacatagcagtcaacctcagaggaaagtcatttattcagaaggcatagattttgctagacagcagtgatgcattacaaatatataattatttgcactaatatttgagcaggtggaatggattagaacatggtcaacatcatgctgctgataacatgtatttttctatattaatatgtactgtgcaacatgtattaaaattgtcaataattnannnnannnaananannaatatttatattactgtgtttaagagacagtatccaactgagccacttttaatttaaaagtctgaaactggaattaagtttactttcaaaaatcacttaaattactttataatcagtgaaaggtcagtaaaatgtagaattataagtgcctagtgacttaataggaggaaatatggagggttaaggaaggaagtaggaacctggaataagaaagctaagtttcatttatagttccaatgagtgactttctttgttttcaccactgggaatcttaaatgaagaaagtgtcgtatcccttccagttatctttatgttaataaactaagtgaagtttggatagaactaacaaaggaattagtctccattggtggacttccagagtttt

SEQ ID NO: 379 - DNA, 662 bp, Homo sapiens
  modified_base (144)..(147): a, c, g, t, unknown, or other
  modified_base (157)..(157): a, c, g, t, unknown, or other
  modified_base (161)..(166): a, c, g, t, unknown, or other
  modified_base (379)..(379): a, c, g, t, unknown, or other
  modified_base (591)..(591): a, c, g, t, unknown, or other
tacgccaactggcgaaaggggaatgtgttccaagccattaagttgggtaacgcagggttttcccagtcacgacgttgtaaaacgacggccagtgaattgtaatacgactcactataggccgaattgggtaccgggccccccctnnnntttttttttngaannnnnngagattttgcgttatattttttaaatgaagcaatacaatcattttttatgtatatatctagttgaggagaaaaaattacagattttttcccccttactccaagataatctaaacagattttactctggatggcttaattataacataatccatgaagttatagccagggggttaaataagaagttgatgacaaacttggtttctctaacaagnatgcaagaaaactcaagtgccacaatgaacacccataaactgctgtcaggaggcaaagtccctatgaggtaataataaacccacgaggttaaggcaaaaccctacggttgtttctgcaaacaaatgtccaggaaactcaagtttgtgatgaaagaacagtcttgaattcaacttcagcagaacctttccctccctgggctccaaagcactangtcacctacctctccactcaaatgccccattaagtaccatcctgttggagcttcctaacgcccctgctccc

SEQ ID NO: 380 - DNA, 644 bp, Homo sapiens
  modified_base (23)..(24): a, c, g, t, unknown, or other
ttttttttttttttttttttttnnttcaaaaagcatttttgtttaatgctaagatcacttcagtttccaaggtcatataaagaaacatccaatttagagaaaaaattctgtaataagttcaaataccaaagcgtaaagatgatgtaacacagtgcctatgctgcatggttacacaaatgaaacgagaaaggtagtgattgcttctaaattctcactgaaaatccaatttaaaggtttattgcagtctaggtatttttaatttttcccttggtgattatcaagatggttgatgctaataagtactattaaaaaactaaaatgctgtcgaatatggaacttcttttagttaagaattattaatatagaaaatgtgagttggtggactggtacttcttgtgctctgatttttatttatttattttcttcttttttttgagacagtttcgctcttgttgctcaggctggagcacacaggcacgatctccactcactgcaacctccgcctcccgggttcaaacgattctgctgcctcagcctcctgagtagctgaggcaggagaatcgcttgaacctgggaggtggatgttgcagtgagcagagatcgcgccattgcgatacagcctgggcacaagagcaaacttcgtc

SEQ ID NO: 381 - DNA, 555 bp, Homo sapiens
  modified_base (70)..(72): a, c, g, t, unknown, or other
  modified_base (499)..(499): a, c, g, t, unknown, or other
  modified_base (501)..(501): a, c, g, t, unknown, or other
  modified_base (503)..(503): a, c, g, t, unknown, or other
  modified_base (507)..(508): a, c, g, t, unknown, or other
ttatagggcgaattgggtaccgggccccccctcgagttttttttttttttttttactgtagaaagaaaannntatttgcaaaagttttattttaaaggatcaaaaataaatactgcacatatacacagagaaaatccactgatatttatgttctttgacgcacactttcaatacatggcaccttcatcttctttattgagaaaataaactgttatgggtccataactggtatgcacagtctctgtgactctggcaaataaccaggagccaagtccatataataaagttggaataccgaggttgacgaccttgagcgccgtgaagaagcggttctgccgggccaggtcctgccagggagccttggagcagtggtacttgatgaaggggaagcagccggtgcgcaggacgtggtagttggcgccctgcaccggccagttgaagtgcgagaggccgaactggtcgttgcggacggcgctgtagggcacgcagaaggaggtcncnangcgnnaggcgccgctgcagcagatgccgcgtcagcacctccgaggcgctggg

SEQ ID NO: 382 - DNA, 949 bp, Homo sapiens
  modified_base (57)..(57): a, c, g, t, unknown, or other
  modified_base (679)..(679): a, c, g, t, unknown, or other
  modified_base (691)..(691): a, c, g, t, unknown, or other
  modified_base (718)..(718): a, c, g, t, unknown, or other
  modified_base (759)..(761): a, c, g, t, unknown, or other
  modified_base (808)..(808): a, c, g, t, unknown, or other
ggccgcgctgagcaggtcatctttgtccgagagacccccaacacagcaggcgcaggngccacaggcggcatcatcgggggcatcatcgccgccatcattgctactgctgtggctgccacgggcatccttatctgccggcagcagcggaaggagcagacgctgcagggggcagaggaggacgaagacctggagggacctccctcctacaagccaccgaccccaaaagcgaagctggaggcacaggagatgccctcccagctcttcactctgggggcctcggagcacagcccactcaagaccccctactttgatgctggcgcctcatgcactgagcaggaaatgcctcgataccatgagctgcccaccttggaagaacggtcaggacccttgcaccctggagccacaagcctggggtcccccatcccggtgcctccagggccacctgctgtggaagacgtttccctggatctagaggatgaggagggggaggaggaggaagagtatctggacaagatcaaccccatctatgatgctctgtcctatagcagcccctctgattcctaccagggcaaaggctttgtcatgtcccgggccatgtatgtgtgagctgccatgcgcctggcgtctcacatctcacctgttgatcccttagctttcttgccaaggatctagtgccccntgacctctggcnaggccactgtcagttaacacatatgcnttccatttgtgatgtctaccttggtggctccactatgaccnnnaacccatgagcccagagaaattcaccgtgataatggaatcctggcanccttatctcatgaggcaggaggtggggaaggtgcttctgcacaactctgatcccaaggactcctctcccagactgtgaccttaagaccatacctctcagccccaatggctcgagtcccccaaaattcacaaaggaagaccc

SEQ ID NO: 383 - DNA, 4599 bp, Homo sapiens
tttcaattaactgttccatttttttaaattgccaatttatttttctacccaatccagtatcaacgatatacaaaaggatataaacagactatcatgaatatttacaggatgacacaccaaacaattaccaaggaacaaatcctgcaaagtaacaaattgttgcttatccatgtccactcaactgtacaaggtttatttctaggacaatttcccagttctctgggaaggaagttctgtggatttataccttccataagggtcaagcaaacatgctaagagctgataccatcatgtttttatactaacagccgagaaaggcttttaaagaacactctctttcaggccaatgttacagcattagtgggctcatagacaggatgtgacttcatcaaaggaaatgcttctctcctcttggtctccctaaggtcctcctcctagtacacaggaggagttccccataataacaccctggttccaacagatggtgtgtagattatcaacacacaatgagaaaaagaaactgacccccttacctaccaaatacaatacagatctggggaggcagtttccagatcttcaacaggcagacactatgtggcctgtatttagtacacagcacattctcttaagagaaaacaggaatgaacattctcagaaacattcacattgctcatcaaatgtagctttacccaaagtatataggaaatggcaaaaacctaacctagctggacattttatacaagtaagtcaaagttcaaaggaatcatcctatctttattctcagaaatccaatgttgaatatcacagttcttctttaatggaagcagaagattcagagtccttgtctcccaaaatgcctcagccagggtcagcacagagagtggaatataaaaagcttaattgtgttaatacatggaagacaacagttctcagtcaacctagccacaattttctgtcttggccatctgtaagaaatgactacgtttgaaattcaactttcacattcaaaaaaaagaaatcaattcagcttcagacacaaagcaaaaccaaaacaaaaaaacaaatggcaatagtctacatatctaaacacttgacaattggggaactgtcccacagtgatatgctcaaggccagtagcacctatttataatttggcatgtactgcttgaaggggcaacaggacccggagctaaaatattcaattataaagatataatacatcgatgaatcagacaaaagtagacatatatgataccacattaaagattcatatacagtactgtgctgactttaaagaaaatattttgggacactagaaggaaaagacaataggaaaagaattacaaaggagcatttcagtccaaagccagtccagtgaatatctatgactaggatttccaatctttgatctccaaagaagctgatctaataaattctaacaatacttcgttcacatttgggacacacaacatacttccaagtacagtaatccctctgacgttttggtttcacttgctatttgatgactaagttgtttctggctataaagatcttcctattttaattagccatttaacactacagaggctgctccctttgagagaccagacaagtttcacagaatttgatctaatgaagatgaatggtggggaaaaaagggaacatttcctgggtttttttgcaaacctttttctcttgcttgaaaaactctgcaatcacttaatgttttgctccagaaaaagaaagcaaaactagctgggaaaatacccatacattaatacttcgtgtttactagcatgatacaaaataaattcatagatgtcagtcaattgtttcttaaagaccaaatgtgaatttttaatcttgtaacttaagaactgagtttttccacattcctttatatagagttagcatctgtaaactgagacccttttttgggtaatcatacaaatttaatttgtccctggaaacaaaaacccaacctaacagattaacaaaatatgtccgttagacaatattttttgtgaatattgctgcactgttaccatttttatccttcagtaaatgaaactacacttaaaaagtttatgtattttgagtttacaaagagctaaactcttaattaagaagactatgaaatcaacctatactcatttcagaactggcttccctcctttcaaaagtaaattctaaaagttttttagttattactattaagttatatgagctagagacatttcgactgccatcaatgcttctgtaaaattgaataaagattttattataccacacacacaaaaagcaatcggtacagaaaaggcagttttcagttattctgttgagaatttctttccatgatttctcccattaaagtatagttttcaaagcaaccaccacgacaaaggaagcatctaattagtccgttttcttctgatccaagaatgctgaacatttactgtcccatctgtagttgtatcagcagtgtaatgaacacagtttatattacttaactattctttgaactccaagaactgttgaagtcttttctgatgttctgcagatgcttgcacagcattcagatgttcaccaaatgtagtagttattcgatagatggcagttttcagtgatgctctgaatgcaaatcttaatgttttatatgaagtgtccacaaggcttcctgaaatccggggtggtttactggaagcatgaggaagcttaaagtacttgtcgactgcctcttgcagtgtcaacaaagtattaaggatagctggtagtgtcgtctggacaactccaaatctatcctctgtaaatgatgctgctactaagtgcgacagaccttctaatgcccaaatatgcatttgggcatctgaaaaaacagcctgaatggaggcctctgggtgcctcagcactaatagaggtagatggagaaggattagaaaattcagtcatttgctgatcagaagctgatgtccacaatcttggcccccttcttattagctgaggactttgcggtgacccatagcaggtgtttacatcaaaaattccagccatccgattcattacactagagccaaatggggtcccaaatgggctcacaacatcaggtgtagataattttgaagaaaacagtgatgttttaactaatggtggcactgaaggccgaggcatctggctagattttggtgtctgaaaagcagtttcttctggagaatttaatttcttaggttccactgggtaagatgaagacactctcccattcgtagcagcagcttcttgatagagaatcagtttctgagtcataccatttaaaagattcaaacactcccttgaaatggctgtccaattgtggggatgtccacctggttggctgaggctgaaaacttcttgtcttcgtgaaggagaatattgagaaagcaacatcaggtcctgcaaggctaaatactttatgatggggggaggattgctatttaacacttttggaaggcactcatctgacccttctgcaaatggtggttgaacaggaaacacatgagcctctgtggcatagattttgaagagtatccatgagacataccaagtcgtcaggagaaagacaccacacagccagacatggtagagtaacgagagatttaagaggccactcactgtgtcaagtggcctatgaacctgctcatctatgtgaaggttcatagcagtgctaatccaagctttgggaatatagccaagaaaataatataaaatgcagaaatttctaaccaggaacagtgattccacacaactgtgtttaactaataagagcagagatctcctaaaacgcaagaacttgtattgctgtatgatgggaaatggaagatagttcatgttgttaacaaaatacaggaggctatagctatagcccataaatgctccagtcagtaggaaaaaaagatgatattcatttaagcaggtttgcgcagcagggctaccaaagctgttagtaccagtgcagggaaccacaagaaagctgtactggccctgggttatcactgcagcacaccaggccatcaccattcccattgcagcatgaataaatgagtgcatgagttgctgaggatgaatgatcttccctatcagagctagtctggagcaaggaatagaaggcacaactgcatagaactccacattgaaaatacttattattattattaccactgacagcagcaggaagtaaaagattacataggaactatacaggtcactgaaagaatcagacagccactgtataggatgaaacaaatcaatcctgctgaaaattataaatactgtggtgcagatgggtagaaatagcactgaccaaacaatacttgcaactatcctccagcccaaaacgcgccacagtatgtcccgcgacctgccggcgcagggccggctcacggccgtggccatggagatggcggcccctagtctagggcgtacaggagaccgtgcgcccgcccgccaccgcagttcaaaggcaggaaggccccaggaggaccctgctgggtctgcctcaaacgctgcctgagcgaagcccggcccaggctccaacccatccctgcgaggcttcgtctggacaagctc

SEQ ID NO: 384 - DNA, 1395 bp, Homo sapiens
  modified_base (152)..(152): a, c, g, t, unknown, or other
  modified_base (332)..(332): a, c, g, t, unknown, or other
  modified_base (368)..(369): a, c, g, t, unknown, or other
  modified_base (415)..(415): a, c, g, t, unknown, or other
  modified_base (431)..(431): a, c, g, t, unknown, or other
  modified_base (465)..(465): a, c, g, t, unknown, or other
  modified_base (467)..(467): a, c, g, t, unknown, or other
  modified_base (473)..(473): a, c, g, t, unknown, or other
  modified_base (475)..(475): a, c, g, t, unknown, or other
  modified_base (553)..(553): a, c, g, t, unknown, or other
  modified_base (606)..(606): a, c, g, t, unknown, or other
  modified_base (847)..(847): a, c, g, t, unknown, or other
  modified_base (873)..(873): a, c, g, t, unknown, or other
  modified_base (929)..(929): a, c, g, t, unknown, or other
  modified_base (1228)..(1228): a, c, g, t, unknown, or other
  modified_base (1342)..(1342): a, c, g, t, unknown, or other
  modified_base (1385)..(1386): a, c, g, t, unknown, or other
  modified_base (1388)..(1394): a, c, g, t, unknown, or other
aaagcctttaacaagttctcaacccttattacacatcagataatttatactggagagaaaccctgcaaacatgaatgtggcagagcctttaacaaatcctcaaattatactaaagagaaactacaaacctgaaagatgtgacaatgattttnactacacctcaaacttttctaaacataaaccatattggtgccctagaaatgtgaggaatatgacaaggactttaaatggttgtcacgcttgattgtaggtaagataatttatattggagaaaaatcctccaagtatgaagaatgtggcaaacttttaaccaatcctcacaccttattgcncaggaaagcatttatacttgagaaaaattgtataannaatatggaaaagccatttatatctgctcacatgtaaaaacatcagntcatacttaataaaangcaattaccgtcaaatctttcagaaaatataagncnttaatncngaggaagagtattcttaagatgaacattacaaatagaaagagggttgtagtacctttagttttatgatagatcttatngtacacattttgtaccagaggaaaaccctaaagcattagttgctcaaactttngttcgacatcagggaatttgtattggagaaaaaccctgcaaatgtaataaatatggaaaaacattttttcaaaaactacagcttggaaaacatcagagagttcatactaaaatatatttttgcagatgcagtaaatatgaaaaatatttaatcccaaattaagtctatgtaaatatcagaattcacagtagaaatcataaggcataaggcactgatacttcagacattacactaaattagnagtgttgagtataggagatccaaaantaaaattgttaggtaagttatttatatataactttaaaagaagtagaagatttttnggagatttataattacattcaaagtatacttttttcttgaaaaaaattacagattttttgaaaagcaattgatgtaatttaactctcaaattcatgtttttcttcattcctattatattcacatgtgaaagcaagtgatctgttgttgctgaatcagagatatgagagattcttttttataggtgggcattatttatgcccctttctgtggaagagtaagaaaattaaaatacaagatgcatgaggaaaatgtagagatgctctttgtgattaacttagaatattaagtgctacttgangtacatgttcagactaacattcttttgcagtatagtgagaaaaaaacattttaaaattaattatcattttgttgattgtgcttttatgtaataaaatgcagtactttaaaacanttagattgtgtgtgaacttaattttgtaattaaacattttttnnannnnnnna

SEQ ID NO: 385 - DNA, 1067 bp, Homo sapiens
  modified_base (45)..(45): a, c, g, t, unknown, or other
  modified_base (683)..(683): a, c, g, t, unknown, or other
  modified_base (685)..(685): a, c, g, t, unknown, or other
cccccaaaatttttttttttttttttttttttttttttttttttnaaagaaacaggatttgttttaatgcatgatttaaaaaaatctacattgtcagaatgtaaatctgattatatcacagtacagtggcctgtattgttttgcacatacatttttaacatttcttacattttgaagaaatgaaatacatgaaaataataaaaaaagcacacagtatagaaggataaaataataccaatttctttctcttcccccaacccaaccttagtctctctccttaaaagtaaccactattaacagtttatatttcatactagaaagaagtctgtatatatactggtaaagtacatatacattgattttggtagaaacagtgaggaagagcctcagttttctttctttccaaacagctgctgattatctcaacatcatttattgggaaatgccagtattatccctattgatctgaaatccaacctttattgtatactaaattctcagatgtagttcggtctcttgagactgttctcttccattgaattggtgcttccttctctagtactctaagttatagacaattcactctatactgagttattgtttcacctagtcttcctcttcttactcattctcagactgtttatgtctcccatgtttgtgttggtcaagttccccagactaancntgttggcattttagttgggatttctaaatgaaatacttacttataatttggaaaaattacagaatttagtttttctcaagaacaaaatatatctttccagttattttagtggtttttaaaaaatatctctcaggagagttttaaagttttcttcccatatgtgtatcacatttcacttatttttagatatttgatcatttttgatgactgttgtaaacagaaatattttcttatattttaagtggttatttgtctaggaaagcttttatttattaacacaataacgagtcacctgactaaatcatcttgctctaaattgtttccagttgatttgtttttttctagatatgcaattacattagctgaaagaaagcatatattt

SEQ ID NO: 386 - DNA, 821 bp, Homo sapiens
  modified_base (67)..(67): a, c, g, t, unknown, or other
  modified_base (70)..(71): a, c, g, t, unknown, or other
  modified_base (73)..(77): a, c, g, t, unknown, or other
  modified_base (79)..(82): a, c, g, t, unknown, or other
  modified_base (179)..(179): a, c, g, t, unknown, or other
ttttttacaccaaaaagcaatataatattcacacgattagaatattcctgaaattgcatcttacagnttnntnnnnntnnnntatttataaaagcaattttaatagccaaaaactatgaacaacacaaatgtctatcaccattagaatgaatcctaaagttgtaatatattcatgaaanataatactacacagaaattaaaataactacaaatgaaacaactctgatgaacatcacagacataaaagaagtcatacatgaaatgcacacattgaaccaattatattaaatttttaaaataggcaatctaaacatttatttagggatgcatggttacagactaaaactgcaaagacaagtgattaccataaaactgaggatgaaggtgattaagcgttaaaatcaggaggggacataaaggagcttctggggtactagcaaagttcaatttcttaacccacataagttacacgattacaatgagttttactccattactgaccctgtcagttgaaaaggcctagaagcaatgacaccccagtagcaatgaacatacccagcacgcagatcttgatttccaaatgctattctccactaaaagaaatagaagtgcctggctccagcgttgaaatgagcctggaatatctgattgtgctcaacagcaaagaaatcactcaatggatgattaagtcatatcaaaaggacacaggatcagcttgaaggagctcccattggcctgatttaggacaatttgggcatcaatatgaatgatagtaaagaaatatacacactgaagaaaataagaaaaaaaaaaaaaaaaaa

SEQ ID NO: 387 - DNA, 501 bp, Homo sapiens
tttagtttgaaatttgcattttaatcagcgtttggctaacaatatgagataaactattagagaagtgtaggtcattctggcaaatagaaagttccatcatttcacacttagaaagctgccacgaagagcttattcttggagtataaaatgcagaatttaggttaagccagtcattttgtagatgaaattgtacactggcaatttcttatggttcaacctaatagtaaaacatttataaacaattgtatcattacaaatacatttagacatcgttttctgctaaactcagtattttcctttccatcctgatcaaagaaacattattgcagtaagccacattataattcagcacgatttcttctaaaaaggctccgagttcctttgagcttgttattgtacagtggatttttcatttgcaaagacgttaagccctccaaatgtgcaaatcatgaagtcagttgttgttccagcaaggtttgcccagcggtaaaaaacaagata

SEQ ID NO: 388 - DNA, 478 bp, Homo sapiens
  modified_base (12)..(12): a, c, g, t, unknown, or other
ccaattcatcancaatttatttttttccataaagtcaccaagctgccaaaacattcagtttggccatttaaaatcatttgaaataatggctttacatttttggaatttatttgtttatatatttatatttcattggtgcaaaagtgctttcaaagcagggattgctctcactggttgaggacatatcttgactccctaacgttttcactggaagttgacagagatgatatttaaaatgtataacaagtgagagcataggcacagaccagtcaggatggatgccaatcacaggtaaaccatggggctattccagtatacattagcagcatcttggtcctggcagtgaccatctcacgtgcatctcatccaggatctcttccttctcagtaaaagcgtgtccattttttccttcatgatctatcctttccatttgtactttgcatcccgttcccacaccagggacagcttgagagccaga

SEQ ID NO: 389 - DNA, 552 bp, Homo sapiens
  modified_base (29)..(29): a, c, g, t, unknown, or other
  modified_base (498)..(498): a, c, g, t, unknown, or other
gagagcttagatagagtgtatttttattnttttttttccatttccttttctcttttcatcttttttctttctttctttctttcctttttttcctttgtatttttatcttaacatgcctagacagagaagaacactggattgtacataatgggctttctttgactctcttttccagagtggaaataggattctgtgctccatcattctgagccatcaccaggggccgtccataatcaactatgatgatgagagtgggaagacatgtgtacatatcgcagcggcagcgggcttcagcgatattattcatgagctggcaagagtccctgagtgtaacctgcaggctctggatgtggatgacaggtatccatggtaaccagaaagtgctgggaaactagtcatttccccctaactgaatcttaaaataaaggagatgtttaaggaggtgtcctatacagctatatccctattgccagtaatacacatgggcttgtgacaatnaaaattgctctattttagtgagaggagaagatattattgttatggagaggaaga

SEQ ID NO: 390 - DNA, 896 bp, Homo sapiens
  modified_base (610)..(610): a, c, g, t, unknown, or other
  modified_base (612)..(619): a, c, g, t, unknown, or other
  modified_base (621)..(621): a, c, g, t, unknown, or other
  modified_base (784)..(784): a, c, g, t, unknown, or other
  modified_base (805)..(805): a, c, g, t, unknown, or other
  modified_base (808)..(808): a, c, g, t, unknown, or other
  modified_base (832)..(832): a, c, g, t, unknown, or other
  modified_base (856)..(856): a, c, g, t, unknown, or other
aagaggaaactaaaaccacatttattaatgctgtttaggtggagaaaagttggaaacaacctaaacatcaaaccataagagatgaggtaaacaaaggatgctgtagctatgtaaatgagtactcttacattacaattgctgtaaactaagcttgttgctctagaaagttgttcatataagatattaagtgccaacgtgttttatgaaagactatacatgatattgtgacactacacttacattaaaatatatgtgtacatattatatatgtatgatactatatgactaaatgatcatcttgtctttggggtaagtaggatttggaagtagctttttcttctttttatttgtctacacttccaaagtttttgtaacaagcatgtgctgctttgcaataatgaaaaatagcaatgctaacatttaactgaaaaaagaaaagcacaattatcctggagtagggcaggcactaaaaaggcgggagtaagagcgatgagagtagaacgctgagctgaggctggcctccttcacggccaccttcctccaggggtggatccgtgttccagtcacctccaaacacacaaagatgtcagtgccacagaccatactttcncnnnnnnnncnagtcaaagcaccaggaggggacagagtcaccacagtgcaagtctcagctgggattgggcaggggagaggagaagggcatcaaggagctgaccaggagacacactgatctggccaggcagcctcttgcagaagtggatcccgttaacaatgaaacagatatganatgaacttggcaacttctganaanaggattgtctagtggtgcttctancctaaagtgacccagtttcagatnagacagttttatccagaactcagaggggggaaaagattaa

SEQ ID NO: 391 - DNA, 1564 bp, Homo sapiens
  modified_base (156)..(188): a, c, g, t, unknown, or other
  modified_base (190)..(190): a, c, g, t, unknown, or other
  modified_base (192)..(195): a, c, g, t, unknown, or other
  modified_base (198)..(199): a, c, g, t, unknown, or other
  modified_base (201)..(203): a, c, g, t, unknown, or other
  modified_base (205)..(260): a, c, g, t, unknown, or other
  modified_base (262)..(262): a, c, g, t, unknown, or other
  modified_base (264)..(267): a, c, g, t, unknown, or other
  modified_base (270)..(274): a, c, g, t, unknown, or other
  modified_base (276)..(484): a, c, g, t, unknown, or other
  modified_base (547)..(564): a, c, g, t, unknown, or other
  modified_base (682)..(715): a, c, g, t, unknown, or other
  modified_base (971)..(1025): a, c, g, t, unknown, or other
  modified_base (1312)..(1336): a, c, g, t, unknown, or other
attcggcacgagcgcgcctgtgtcctctctaggaaggggtaggggaggggcgtctggagaggaccccccgcgaatgcccacgtgacgtgcagtccccctggggctgttccggcctgcggggaacatgggcgtgctcagggtcggactgtgccctgnnnnnnnnnnnnnnnnnnnnnnnnnnnnnnnnngncnnnngannannncnnnnnnnnnnnnnnnnnnnnnnnnnnnnnnnnnnnnnnnnnnnnnnnnnnnnnnnncntnnnngtnnnnngnnnnnnnnnnnnnnnnnnnnnnnnnnnnnnnnnnnnnnnnnnnnnnnnnnnnnnnnnnnnnnnnnnnnnnnnnnnnnnnnnnnnnnnnnnnnnnnnnnnnnnnnnnnnnnnnnnnnnnnnnnnnnnnnnnnnnnnnnnnnnnnnnnnnnnnnnnnnnnnnnnnnnnnnnnnnnnnnnnnnnnnnnnnnnnnnnnnnnnnnnnnnnnnnncaggcagaagctctccggaggatccaggtggtgcatgcatttgacatcttccagatgctggannnnnnnnnnnnnnnnnnaggcactgtggcccagcaggtgactggttcttcaggaactgtgaaggtggtggttgtggactcggtcactgcggtggtttccccacttctgggaggtcagcagagggaaggcttggcnnnnnnnnnnnnnnnnnnnnnnnnnnnnnnnnnnctggcccgggaccttggcatggcagtggtggtgaccaaccacataactcgagacagggacagcgggaggctcaaacctgccctcggacgctcctggagctttgtgcccagcactcggattctcctggacaccatcgagggagcaggagcatcaggcggccggcgcatggcgtgtctggccaaatcttcccgacagccaacaggtttccaggagatggtagacattgggacctgggggacctcagagcagagtgccnnnnnnnnnnnnnnnnnnnnnnnnnnnnnnnnnnnnnnnnnnnnnnnnnnnnnnnttggggacccctcccaacttttcttcccagtaacgcctgctgtttactgccacctggcactggtgactacagacgttctcaggctggccagaagagacatcttgggttccttggcctcactctctgtaagcatataaaccacaggcgaaagaggatgctgcattgcgaggacccagaaattcatactggtgccacgtttccttcccttatttctaacgtgtatgtttctggtggaaaccaagttcaccctggctgggagcatctctgatgaggcatgctggcgactnnnnnnnnnnnnnnnnnnnnnnnnnttgtgtcctgtgctccctcctagcgcagtggccaagccgggaaagcctctaacttgcctttgctgctgctgccttttttttcttttgtctctgcctttccatttgttagatgggggcccactcttccttagctctgtctctgagttactgggtggaaataagcttataaatgaaatactcttcttcatctctgttttgctcttaaaaatataaaaaggcaattccccg

SEQ ID NO: 392 - DNA, 4259 bp, Homo sapiens; identical to SEQ ID NO: 312
  modified_base (104)..(120): a, c, g, t, unknown, or other
  modified_base (326)..(357): a, c, g, t, unknown, or other
  modified_base (956)..(958): a, c, g, t, unknown, or other
  modified_base (967)..(967): a, c, g, t, unknown, or other
  modified_base (998)..(998): a, c, g, t, unknown, or other
  modified_base (1036)..(1036): a, c, g, t, unknown, or other
  modified_base (1110)..(1110): a, c, g, t, unknown, or other
  modified_base (1114)..(1114): a, c, g, t, unknown, or other
  modified_base (1116)..(1116): a, c, g, t, unknown, or other
  modified_base (1149)..(1149): a, c, g, t, unknown, or other
  modified_base (1167)..(1167): a, c, g, t, unknown, or other
  modified_base (1296)..(1296): a, c, g, t, unknown, or other
  modified_base (1368)..(1427): a, c, g, t, unknown, or other
  modified_base (1430)..(1431): a, c, g, t, unknown, or other
  modified_base (1433)..(1433): a, c, g, t, unknown, or other
  modified_base (1435)..(1437): a, c, g, t, unknown, or other
  modified_base (1579)..(1579): a, c, g, t, unknown, or other
  modified_base (1606)..(1628): a, c, g, t, unknown, or other
  modified_base (1860)..(1907): a, c, g, t, unknown, or other
  modified_base (1965)..(1965): a, c, g, t, unknown, or other
  modified_base (2007)..(2007): a, c, g, t, unknown, or other
  modified_base (2189)..(2189): a, c, g, t, unknown, or other
  modified_base (2228)..(2228): a, c, g, t, unknown, or other
  modified_base (2351)..(2353): a, c, g, t, unknown, or other
  modified_base (2355)..(2356): a, c, g, t, unknown, or other
  modified_base (2398)..(2399): a, c, g, t, unknown, or other
  modified_base (2401)..(2401): a, c, g, t, unknown, or other
  modified_base (2486)..(2486): a, c, g, t, unknown, or other
  modified_base (2516)..(2516): a, c, g, t, unknown, or other
  modified_base (2566)..(2566): a, c, g, t, unknown, or other
  modified_base (2616)..(2616): a, c, g, t, unknown, or other
  modified_base (2651)..(2673): a, c, g, t, unknown, or other
  modified_base (2677)..(2677): a, c, g, t, unknown, or other
  modified_base (2683)..(2683): a, c, g, t, unknown, or other
  modified_base (2749)..(2749): a, c, g, t, unknown, or other
  modified_base (2752)..(2752): a, c, g, t, unknown, or other
  modified_base (2756)..(2771): a, c, g, t, unknown, or other
  modified_base (2931)..(2932): a, c, g, t, unknown, or other
  modified_base (2956)..(2957): a, c, g, t, unknown, or other
  modified_base (2963)..(2963): a, c, g, t, unknown, or other
  modified_base (2974)..(2974): a, c, g, t, unknown, or other
  modified_base (3062)..(3063): a, c, g, t, unknown, or other
  modified_base (3122)..(3122): a, c, g, t, unknown, or other
  modified_base (3328)..(3328): a, c, g, t, unknown, or other
  modified_base (3476)..(3476): a, c, g, t, unknown, or other
  modified_base (3481)..(3481): a, c, g, t, unknown, or other
  modified_base (3483)..(3506): a, c, g, t, unknown, or other
  modified_base (3691)..(3691): a, c, g, t, unknown, or other
  modified_base (3696)..(3696): a, c, g, t, unknown, or other
  modified_base (3730)..(3730): a, c, g, t, unknown, or other
  modified_base (3946)..(3946): a, c, g, t, unknown, or other
  modified_base (3968)..(3971): a, c, g, t, unknown, or other
  modified_base (3973)..(3973): a, c, g, t, unknown, or other
  modified_base (3975)..(3975): a, c, g, t, unknown, or other
  modified_base (3977)..(3977): a, c, g, t, unknown, or other
  modified_base (3979)..(3980): a, c, g, t, unknown, or other
  modified_base (3982)..(3984): a, c, g, t, unknown, or other
  modified_base (3986)..(3992): a, c, g, t, unknown, or other
  modified_base (4016)..(4016): a, c, g, t, unknown, or other
  modified_base (4024)..(4024): a, c, g, t, unknown, or other
  modified_base (4043)..(4043): a, c, g, t, unknown, or other
  modified_base (4066)..(4066): a, c, g, t, unknown, or other
  modified_base (4081)..(4081): a, c, g, t, unknown, or other
  modified_base (4102)..(4102): a, c, g, t, unknown, or other
  modified_base (4122)..(4122): a, c, g, t, unknown, or other
  modified_base (4127)..(4128): a, c, g, t, unknown, or other
  modified_base (4131)..(4131): a, c, g, t, unknown, or other
  modified_base (4144)..(4144): a, c, g, t, unknown, or other
  modified_base (4161)..(4161): a, c, g, t, unknown, or other
  modified_base (4170)..(4170): a, c, g, t, unknown, or other
  modified_base (4185)..(4185): a, c, g, t, unknown, or other
  modified_base (4187)..(4187): a, c, g, t, unknown, or other
  modified_base (4189)..(4189): a, c, g, t, unknown, or other
  modified_base (4209)..(4209): a, c, g, t, unknown, or other
  modified_base (4213)..(4213): a, c, g, t, unknown, or other
  modified_base (4218)..(4218): a, c, g, t, unknown, or other
  modified_base (4224)..(4224): a, c, g, t, unknown, or other
  modified_base (4227)..(4227): a, c, g, t, unknown, or other
  modified_base (4231)..(4231): a, c, g, t, unknown, or other
  modified_base (4233)..(4233): a, c, g, t, unknown, or other
  modified_base (4246)..(4246): a, c, g, t, unknown, or other

SEQ ID NO: 393 - DNA, 753 bp, Homo sapiens
  modified_base (83)..(120): a, c, g, t, unknown, or other
  modified_base (226)..(247): a, c, g, t, unknown, or other
  modified_base (448)..(463): a, c, g, t, unknown, or other
  modified_base (477)..(478): a, c, g, t, unknown, or other
  modified_base (480)..(480): a, c, g, t, unknown, or other
  modified_base (482)..(482): a, c, g, t, unknown, or other
  modified_base (484)..(487): a, c, g, t, unknown, or other
  modified_base (489)..(491): a, c, g, t, unknown, or other
  modified_base (493)..(493): a, c, g, t, unknown, or other
  modified_base (495)..(495): a, c, g, t, unknown, or other
  modified_base (516)..(516): a, c, g, t, unknown, or other
  modified_base (523)..(523): a, c, g, t, unknown, or other
  modified_base (540)..(543): a, c, g, t, unknown, or other
  modified_base (558)..(583): a, c, g, t, unknown, or other
  modified_base (722)..(722): a, c, g, t, unknown, or other
ttttttttttgtctctgggtagtcacgctagggctggcaggggaggaggcagaggaaaggcagggagaagagaaaacatcacnnnnnnnnnnnnnnnnnnnnnnnnnnnnnnnnnnnnnnaccagcccagcccacacagagggtctgaaaggttctcagccttctccatcacccaccctgcggcctctgaaaagaggggcccatctcagacacaaaagcagatacnnnnnnnnnnnnnnnnnnnnnnaacggaggaatactcacagcaccgtggcacgggacggcccttggcttcagagccgggctggcaccgtttgtaaacattagacctggtgatgtctggggatggaggaggagagggatgcccagcctggaccatcaggtttgatgaaagagacagggtggggcccctcaaggcctgggaaatgtctattagctatgggaaagnnnnnnnnnnnnnnnnggtgggggttgccnngnangnnnngnnnangntctgaatctacctgactatgnatttgcntgacttcagtgctaccnnnngaagtggccaggctnnnnnnnnnnnnnnnnnnnnnnnnnngtaatgagcacaacccctactcaggacagggtgctctgtggaagatggtgggcttctgtccataggcattctccaaaaagaagcagaactggatcttcttatgagaactacgactctttttccccgggattccagcctntgggagttgaaactggggaaagaaagaaggc

SEQ ID NO: 394 - DNA, 2868 bp, Homo sapiens
  modified_base (227)..(227): a, c, g, t, unknown, or other
  modified_base (300)..(300): a, c, g, t, unknown, or other
  modified_base (344)..(344): a, c, g, t, unknown, or other
  modified_base (354)..(354): a, c, g, t, unknown, or other
  modified_base (552)..(554): a, c, g, t, unknown, or other
  modified_base (556)..(560): a, c, g, t, unknown, or other
  modified_base (562)..(572): a, c, g, t, unknown, or other
  modified_base (595)..(596): a, c, g, t, unknown, or other
  modified_base (598)..(609): a, c, g, t, unknown, or other
  modified_base (611)..(611): a, c, g, t, unknown, or other
  modified_base (613)..(615): a, c, g, t, unknown, or other
  modified_base (617)..(627): a, c, g, t, unknown, or other
  modified_base (629)..(629): a, c, g, t, unknown, or other
  modified_base (631)..(636): a, c, g, t, unknown, or other
  modified_base (638)..(638): a, c, g, t, unknown, or other
  modified_base (690)..(690): a, c, g, t, unknown, or other
  modified_base (769)..(769): a, c, g, t, unknown, or other
  modified_base (1657)..(1657): a, c, g, t, unknown, or other
  modified_base (1716)..(1716): a, c, g, t, unknown, or other
  modified_base (1768)..(1768): a, c, g, t, unknown, or other
  modified_base (1792)..(1792): a, c, g, t, unknown, or other
  modified_base (2493)..(2493): a, c, g, t, unknown, or other
  modified_base (2495)..(2497): a, c, g, t, unknown, or other
  modified_base (2501)..(2501): a, c, g, t, unknown, or other
  modified_base (2503)..(2505): a, c, g, t, unknown, or other
  modified_base (2507)..(2507): a, c, g, t, unknown, or other
  modified_base (2629)..(2630): a, c, g, t, unknown, or other
  modified_base (2632)..(2637): a, c, g, t, unknown, or other
  modified_base (2708)..(2708): a, c, g, t, unknown, or other
  modified_base (2779)..(2779): a, c, g, t, unknown, or other
  modified_base (2785)..(2786): a, c, g, t, unknown, or other
gggagggctagtggaagacttaagatggcggcgtttgcacggagtgcaatcactgcgtccttacgggggttgcaaggcgtccgaagtatgagtccactaacaaaagtccagaaactcgccagttaatagtattgtgtctcttcaaaatatcggagaataatttctttctcgctgatcgcctaacttctactgacgaagcttggaagttgcagaaggttggagtgcantggcgcgatctcggctgactgcaacctccacctcctggattcaagctattctcctgcctcagcctgccgagtngctgggattacaggcatgtgccaccgcacccagctaattttgtnttttttagtngagatggggtttctccatgttggtcaggctggtcttgaactcctgacctcaggtgatccgcccacctcagcctcccaaagtgctgggattacaggcgtgagccaccgcgcccggccagaacattagttttaaacttcctaacccttgggagaaggcaaaacacttgatgaaatctacataaagactaaaacattttannnannnnngnnnnnnnnnnntttgaaattgcattgacgactgnnannnnnnnnnnnntnannnannnnnnnnnnngnannnnnncntcattcctgagtctcctgtaccactgagaataggctggagtgcagtggcgcnatctcggctctctgcaaccttcacctcccgtgttcaagtgattctcctgcctcagcctcctgaatacctgagattacangcatgcaccaccacgcccgtctaattttgtattttcactagagacggggtttctccatgttggtcaggctggtctcgaactcccgacctcaggtgatccgcccgcctcagcctcccaaagtgctgggattacaggcatgagccaccgcgtccagcaagaataggtgattttcaaacttggaaacattcagaagttatcgcctcagtttcagattgagtagtctcaaagagattacagacatctaccacaaattctctacttggtgtggtgcaaaatcagtatgatgtaaactttgtctctcagtttcttcaaaggaaagaagcaactggaacacacatataacactaacccttccagctgcattatgagggaccagtacctgtctcaaggcaaaattatgacttagttcatcctcacctctggaggccagtaaaagtgggttatagaagaacaaagaggcatctagatctttcactgggttatttggagagaaacatctcctaccgaaggccagtttaacaagactggtagaggaggttatcttatctaattcacagaaatcaacacattgagtcaagaaaaatgaaacacagaaacactctaaataaaagaagataagtcttcagaaaccaaccctaatgaaatgaagatatgtgattaacctgacaggaaattaaaaagagcaaccataaagagtctcatgggagcaatgcatgaacaaactgagaattttcataaagaaataaaagataacaaaaagtataaagttgaagaatacaataactggactcaaaaatttaatgtgtccaacagaagaatcgatgaagcagaagaaagggctatcaaacttgtagataggccattggaaatcatgtaatgtgaggaganaaaaagaaaaaagattgaagatagtttaagagacttttgagacatcctcaaaggggaantaatttatacattaccagatggagaagatagagggaaaaggacagaaaacantatttgaagaaataatgtcagaanaacctcataattctggcaaggaaatagaaatttagatctaagaatctcgaacatcaggtatgatgaatccaaggagactcacaccaaaccatattgtaattaaataaaggttaaagacaatcttcagagcagcaagggaatagtctcttcttacatacaaaatgatccacggaagactgtcagcagacttcaccagaaaactttcacgccagaaggcagtcgtgatatatacaaaaagctgaaaggaaaacactgccatccaggaatactatctccaactatcctgtgtttcaaaaattaaggagaaatataaagttctcaaacaaaagatgtgggagtttaccaccactagacctgcacgggaagaattgctaaagggagtccttcaagctgtagtaaaagagtgctaattagaaacatgaaaacaaatacaaaaaaaattctaaaacttgtatggaactacaaaagacattaaataatcaaagtaatcttgagcaacaaggacacagctggaggcatcactctacctgattttgtaatccattatcaaaaaactgtggtaccagcataaaaacagattcactgaccagtggaacaggaaagcccagacataactcatacatttccatccaattgatttttgacaaaagtggcacacagaatggggagaggacaaataaataaataaattgttttgaganannngtanannnanatgtgaaattgaaccattttctcatagcatatagaaaaatcaactcaaaatggattaaagcctgaaatgttgcctttgaaactgtaaaactactagtagaaaatataggggaaaagctctannannnnnntctgggcaatgatttcttggatacatccttaaaagcatgggcagcaaaaacagccagacaactatcagggnacctgcccagatagtcacataggttcttttctattttccctaagcattggccgggttgagaaataaagggncagagnnccaaaagaaagaaattttaaagcttggcattcttgggagacaatacatgtcggtagggttcgtgatgccccccgagccgtaa

SEQ ID NO: 395 - DNA, 1522 bp, Homo sapiens
  modified_base (692)..(696): a, c, g, t, unknown, or other
  modified_base (698)..(698): a, c, g, t, unknown, or other
  modified_base (701)..(705): a, c, g, t, unknown, or other
  modified_base (719)..(720): a, c, g, t, unknown, or other
  modified_base (810)..(810): a, c, g, t, unknown, or other
  modified_base (1033)..(1033): a, c, g, t, unknown, or other
  modified_base (1036)..(1036): a, c, g, t, unknown, or other
  modified_base (1376)..(1376): a, c, g, t, unknown, or other
ttttttttttttttttttttttttttttttcttttaaaattcatttataaaaataaattttagtttgagaccctaggtaccaaattgtggcttaatttactcaagatggatgtactacaaagttatgaaaaatgtagctgaaaacccatgagctccagctcatttctgcagcgtggccaacagctgccactgtacactgtcacaacccttctcataggtaaccaaaatacgctcaacgtcttgacaaacttttagccttcctttgtcctgaaactcccacacaactttaattcttagacctccattataaaactattagtaaccataatacattcaagatagagaatgaagacctgtcatccactcaggagacactgaaccagggcactgggacaacacggccactcaggggaaatagtcacccttgtgggtgtacagctcttcagatgttttgcactagaatgcaggcaaaaagtcccttatgtaatttttatctccaagcaacaacatttaaaaatcagttgaagagtgtcagcaggtgcttctaggttctgtgctgtgagcccccaggtcgtggagtgtagggctctggatctctctgtacacgggatagaaacacagtcacgtggaaatgccaatatgacttactgcttagggctgtgctgacatcggcatctctgttagactgattnnnnnangannnnntttttttttttttnngccttagtcaggagattattcgaggaacagtaaagaactgaactaaggaagtagctactggcttccaaagccacacacacacaaaagtangtttcaaactgttgtcctctctcagtgcaaacgagcaattggcggacctgtcacgtttcatcaatcgatacgaacacagcattcagtctgtggaacaatgtgatgcggcaaaaatctgatctaatgcaaattcaagcccattaaataaaaccacagaaaggagagccagcccggctcagtgtcctcgcgcacggacgctgactcgtagcacaaaagcagctgnaanggcacgaggctcagatctcactgatcgtcctctctgaagggcagtactccgaggggcctggcgaggacatgtagaaagactgcgttttccttttcaatcgggcccttttgttggccaacaccagactgcgccggcttgaactgatgatttccgaaatgaacttcttgcagtccacacacacctccatggtgctccagtcctccatcaactctttgggaaactggagttcttcatctgatttgtccatagacttagattttgaggagaacctggcaatgctccgaagtggccgatgatgggcagtggagggtttttctgacctcatactactttcccctcntttgcagagcagaaggtcccaatgaaaagataggaagagtggagtatggtttggagggcagccgcatctttttgcaacactgtgagcacaccggcctcttacagaactgacaggtataagaccaagtgaagaaggaaaacctcccc

SEQ ID NO: 396 - DNA, 1889 bp, Homo sapiens
atggcgtccgggcctcattcgacagctactgctgccgcagccgcctcatcggccgccccaagcgcgggcggctccagctccgggacgacgaccacgacgacgaccacgacgggagggatcctgatcggcgatcgcctgtactcggaagtttcacttaccatcgaccactctctgattccggaggagaggctctcgcccaccccatccatgcaggatgggctcgacctgcccagtgagacggacttacgcatcctgggctgcgagctcatccaggccgccggcattctcctccggctgccgcaggtggcgatggcaacggggcaggtgttgtttcatcgttttttctactccaaatctttcgtcaaacacagtttcgagattgttgctatggcttgtattaatcttgcatcaaaaatcgaagaagcacctagaagaataagagatgtgattaatgtattccaccacctccgccagttaagaggaaaaaggactccaagccccctgatccttgatcagaactacattaacaccaaaaatcaagttatcaaagcagagaggagggtgctaaaggagttgggattttgtgttcatgtcaagcatcctcataagatcattgttatgtatttacaagtcttagaatgtgaacgtaatcaaaccctggttcaaactgcctgggtagtccatgatggtaagtcatagaactctgccctctgcacttcagcccatgacctcaggatggcctgattggctaccctgctctccagccaatccagtgcaagctctcatccgagattcactgaagtggtccatatccatctggcagcatcttctagttctgtcggggtgtcaaaaggatttgtatatttgcttctagaatgtgtatagcatgaatactaccaaaggagacgacaaacttgcagcttaaaatgggcaccagttcccacactggcttaatttatataactgcttggctgtattgcgggaattacatgaatgacagtcttcgaaccaatgtgtttgttcgatttcaaccagagactatagcatgtgcttgcatctaccttgcagctagagcacttcagattccgttgccaactcgtccccattggtttcttctttttggtactacagaagaggaaatccaggaaatctgcatagaaacacttaggctttataccagaaaaaagccaaactatgaattactggaaaaagaagtagaaaaaagaaaagtagccttacaagaagccaaattaaaagcaaagggattgaatccggatggaactccagccctttcaaccctgggtggattttctccagcctccaagccatcatcaccaagagaagtaaaagctgaagagaaatcaccaatctccattaatgtgaagacagtcaaaaaagaacctgaggatagacaacaggcttccaaaagcccttacaatggtgtaagaaaagacagcaagagaagtagaaatagcagaagtgcaagtcgatcgaggtcaagaacacgatcacgttctagatcacatactccaagaagacactataataataggcggagtcgatctggaacatacagctcgagatcaagaagcaggtcccgcagtcacagtgaaagccctcgaagacatcataatcatggttctcctcaccttaaggccaagcataccagagatgatttaaaaagttcaaacagacatggtcataaaaggaaaaaatctcgttctcgatctcagagcaagtctcgggatcactcagatgcagccaagaaacacaggcatgaaaggggacatcatagggacaggcgtgaacgatctcgctcctttgagaggtcccataaaagcaagcaccatggtggcagtcgctcaggacatggcaggcacaggcgctga

SEQ ID NO: 397 - DNA, 2244 bp, Homo sapiens
gggattgtgaatgaagaaagtgaagttttcctcccacacaggttcattggttttgtatcgaatcttgctctcctgggccttgtgcccaactgacatctggacaacaggatttgggttgctgcttattttcttccctgactttaaagctctctgaactgcagtcttcttcaagacatcggggttaaattctaatgggttactcggaaggttccttgctgaatccaagtacaagatcagcaatgcagaggaaagaccatcgttggcttggtctttgtcagctttgatgtctgttagcaccttgtcgaggtttgacgcatttggcattaacgtgagccactccagtctcaagtgtagcttccccttgggaacctcgtccagagtgaaccattcatctaaaaggcgctccttttcaacttcaatgaggtcaatcataagacttcctaaaaagtcatccttgtctgggtcttcatcaaagagctcaatctctaattcttgtccaggatgttcatacactaaagcctcatagacttcattccactttggactgaggttctccttgatgactctgctttggaagatttggttgccaactctaatgattccataggggtctgactttcccttgacaagtcccttaaggtaagtgtctttcccctgaagatcctgagcttcaataaaatgtatccttagaacaccctttggtacaggaaaccgcaactgagctatttgaacttcactgacaagtggaacggtgattcgattgggaagcaccagatagtttgatattatatccaaaatgatagtatctgataaaccattcaatccagggacatccagaagattcgtcagtcctgtccagttaatttctaaaagtggtttcctaaggaagaagatagacaaagctccaactaagggcatatctccaatcaacggttccaggatcacccgcatggtaccatgaatctggatacttttcacaccagctctacaaaaatatcgtttgatctccaaatcaatctcacaatttcctacaaaactaatctgaaggtccaaaataatttgccttttgtctacattttcagtgtataccttaacaccattgatcctgaggggctgctggcccacgtcgaccttcgtgaaactaaaggtgctaaggtgggtgtttgctccccgcacggctggttctatagtttctcgaaacaacttctctataaattggcaaatgaaaggccacatgtgttttacagtcttatttagccattctgctctttcagtgtctggaaaatgaacccaggcgggcaggtcgcaggcgcgcacccccaggcgcacgacgcgctcctcgtcttccagcagcgccagcgcgcggcacaggcgcagggccttgaggccgcggctgcggcgacaccaggcgagcagcgcgagcgcgaggagaacccagctgaagctgagccccaggtagcccagcgcgtacacgggcagcagcagcgcgaagctccgcgccagctgcgccagcagcccgggcagctccacgctcagcacgcccccggggttctcaggcgccgcgcggcccccagccccgccggcgcccgcctccgggccctcgccccgggcgccgctcatcgccccgcagtgccgcgctgccctcccggccgaggcgggctgggtgctcgcgctttcacagaattattccagggtttatgtgtcagggtggtgacttcacacgccataatggcactggtggcaagtccatctatggggagaaatttgaagatgagaacttcatcctaaagcatacgggtcctggcatcttgtccatggcaaatgctggacccaacacaaatggttcccagtttttcatctgcactgccaagactgagtggttggatggcaagcatgtggtgtttggcaaagtgaaagaaggcatgaatattgtggaggccatggagcgctttgggtccaggaatggcaagaccagcaagaagatcaccattgctgactgtggacaactcgaataagtttgacttgtgttttatcttaaccaccagatcattccttctgtagctcaggagagcacccctccaccccatttgctcgcagtatcctagaatctttgtgctctcgctgcagttccctttgggttccatgttttccttgttccctcccatgcctagctggattgcagagttaagtttatgattatgaaataaaaactaaataccaaaaaaaaaaaaaaaaaaaaaaaaa

SEQ ID NO: 398 - DNA, 3186 bp, Homo sapiens
agttaatatgatcctctgttgaagcaagaagacaaactgtatggtggagaaagaagtgggaaggatctgcgcggaagaagcctgagaagatgatgcacagatagagaggcaccaggacttgagaggcaccaggacttgggaggcatgttgatccatctccaggaaagactgagaaaaagagcgttgaatataagaaaaaatacttcctctgttctcagatcgtatttgttttaaggccacacctttttgaagttttcagtttgaaacacaacctggactgaaatcatgagggaggttgtgtaggaaagaatcatcaagggacttagttgggagcttctctaccacagcttactccttatggtattaaccccctttaagtgtaaatgtctttggtttaaaacgtttgtacctcatctgttaccagagtgttcatactggagagaaaccctatgaatttactgaatgtgggggaactgttactcatatgttgcatttcgtcgaacgtgcaagtcatgctgaagagaaaccctgtgcttctaaggagtattgacaagcccttagctagatgacaatctcattgagaagcagaaaattcatgctggagagaaactagtgaaggtagcaatacttcattgaatattagaaaatttttctagagagaaagcattgaatatactgagtatgataacatttcctctcaaaccttatcccttactctgcatttgggagatcatacacagagaagccttataaatgtaagagatgtggaaatatcttcagccaaaagtaaatcctcactcatcaagaaatttttactggagagaaaccttgtgaatgtgggaaagcttccattcagatgtcacacctcagccagcagaaaatttacagtggggaaaacccctttgcctgtaaggtatgtggaaaagtcttcagccacaaatcaaacctcactgagcatgagcattttcacacgagagagaaaccttttgaatgtaacgagtgtggaaaagcctttagccaaaagcagtatgtcattaaacatcagaacacccatactggcgagaagcttttcgaatgtaatgaatgtggaaaatcatttagccagaaggaaaacctccttacgcaccagaaaattcacactggagaaaaaccttttgagtgtaaagattgcgggaaagctttcattcagaagtcaaacctcatcagacaccagagaactcacacaggagagaagccctttgtatgtaaggagtgtggaaaaaccttcagtggcaaatccaaccttactgagcatgagaaaatccatattggagagaagccttttaaatgtagtgaatgtggaacagcctttggccagaagaagtacctcataaaacatcagaacattcacactggagagaaaccctatgaatgtaacgaatgtggaaaagccttctctcagcgaacatcacttattgtacatgtgaggattcattcaggtgataaaccttacgaatgcaatgtttgtggaaaagccttctctcagagctcatctctcactgtgcatgtgagaagccatacaggggagaagccctatggttgtaatgaatgtgggaaagctttctctcagttctcaacccttgctctgcatttgagaatacacacaggtaagaagccttatcagtgcagtgaatgtgggaaagctttcagccagaagtcacaccacattagacaccagaaaattcatactcactaaaaaccccatgaaagccttgaaagtgggaaagctttcattagaaatttgcacctcatcatgccccagaaataatccttctgaagcaaagcaccacgaatgaggttaactttaacaagtactaaaaacttaagggacaccagaaaatttgtactgaagagaaagacatgcatatgattaaaaccctgtgtccaacagagaaacctgcagcagagataatggtgaaagtttaggcacattttcactaaaagtgggaacagaaaatggaggcctgttttttattgctaccaccatagatctggagatcttcgccagtaacaagaaaaattaagttgtaaatattggaaaggaacagacaaaaatagatgacatggtcatctacaactaatattaagactcctgtggtattgattgagcagagcagaagagatttcaaaaaaagacctatgcatttattagaatttggaatatgatacaagtggcatcaggaaatgaggaaataatggaactattttttttaagtggaggtagtttgttctccaagggggaaaaatagaccatgaactatacacaaaagtgaatccagagattaaaaacagaaatatggaaaagctatgtactaaaatgcatatgaccttgggaatagggaaacattccttggaacaatttgagaaatacttagcggttctacttatgagtatgaatgctcaggaaatacgcactaggatatttactgtggcttgatttgtagtagccaaaaattagaaacaactgagaaagcccatcacgaacaatatgggaaattcttatgtaatactatatatctgtaaaatgcaacaaatgaaatccacatgtattaacagaaagatcccagaattgttgaggggggatcaagttgcagaatgatacagatagtacaatgacttttttgtaaatttgaattaaaagtttcctcataaaactcagtactatctattggtaatggatgcatatatgtatgtacatgtacatgtttttgaaacggattggaaggatacagaccaaactcttgatagtggtcacctgtgaagagtggagaagggaaaataatgagtgtgggaggtgggatgggtattggttaaaggggacttcagctttttatataaacatccacttctctttcaaaagacttcaagtaaatataagaagatactgattgattctggattgtggtatagggatatcttgtcttattttttgtacttttctgtatttttaaaatttctcaaaataggaatgggagtgaggatgggaatgctgtatctgtggaagtcatgttatactggattcatttccaattaaatactaaacattttatagaaaatatttctaaaattttatcacggatgaatggatggacttgctctctatgtaatatgaaattaatctattttattaaaatttaaaaggacagc

SEQ ID NO: 399 - DNA, 5581 bp, Homo sapiens
agctcctgtgacagacggagctggagcggcggggcggcggcggagtccggcggccgggagagcgagtgagcgagcggaggagcagcgacacgggagtctagggagcgagaaggagaaggaggggagcgctcgggcgcgagcgagagaaaccgcgagcgccgagcttggactcgagccccggaacggctgaggagcccgcccgctcccctcccctccccctccccgggcccgggcccagcgcgccatcctcccccctccttccctccctccctccttcctccctcccctctccctccccctcccccgccggtggatgggagtgaaggacggaagaggcccggcggaggcggcggtgcagcgctccggtggaatgaatcttacttgttgaatatcttctggttactagttggattcatttgtgaaagaatcattttcccctgtgtggaagacacttagtggcatatttaaattataagtccacggatcaaaaagctttttgatttcccaaaggagggacataccactatatcagataagcttgacattacagccaagatggtgctgtcccagagacaacgagatgaactaaatcgagctatagcagattatcttcgttcaaatggctatgaagaggcatattcagtttttaaaaaggaagctgaattagatgtgaatgaagaattagataaaaagtatgctggtcttttggaaaaaaaatggacatctgttattagattacaaaagaaggttatggaattagaatcaaagctaaatgaagcaaaagaagaatttacgtcaggtggacctcttggtcagaaacgagacccaaaagaatggattccccgtccgccagaaaaatatgcattgagtggtcacaggagtccagtcactcgagtcattttccatcctgtgttcagtgttatggtctctgcttcagaggatgctacaattaaggtgtgggattatgagactggagattttgaacgaactcttaaaggacatacagactctgtacaggacatttcattcgaccacagcggcaagcttctggcttcctgttctgcagatatgaccattaaactatgggattttcagggctttgaatgcatcagaaccatgcacggccatgaccacaatgtttcttcagtagccatcatgcccaatggagatcatatagtgtctgcctcaagggataaaactataaaaatgtgggaagtgcaaactggctactgtgtgaagacattcacaggacacagagaatgggtacgtatggtacggccaaatcaagatggcactctgatagccagctgttccaatgaccagactgtgcgtgtatgggtcgtagcaacaaaggaatgcaaggctgagctccgagagcatgagcatgtggtagaatgcatttcctgggctccagaaagctcatattcctccatctctgaagcaacaggatctgagactaaaaaaagtggtaaacctgggccattcttgctgtctggatccagagacaagactattaagatgtgggatgtcagtactggcatgtgccttatgaccctcgtgggtcatgataactgggtacgtggagttctgttccattctggggggaagtttattttgagttgtgctgatgacaagaccctacgcgtatgggattacaagaacaagcgatgcatgaagaccctcaatgcgcatgaacactttgttacctccttggatttccacaagacggcaccctatgtcgtcactggcagcgtagatcaaacagtaaaagtgtgggagtgccgttgattgtgtctccttcggcccctcctccctcttttcctctggatgcactctgatgataccatggttaccccattgagctctgtttaaataaatattgtcctttcatgtaaattattctggatgtagattgagcttattaaatgttacacacaaagtattcatgcatggtgaatccaaattgtatactgtaaatttacatacgttgtctagaagtaccatagggtttaaaaacctgggctggcattggtcacaccaggcctaagaaggcagaagttgaatcaattgaactagggcactaaactgaatagttgacagtgtcattttatgttggattattaattcctgtttttctttctgctatctgttggtgcctgacttgatggcctcatttggggaaaagtggtggttattagggcttttcctgaaatgtgtatctatgtaacatcacttaagtgtgcttaataaatctcctgtaaggattttagatgataaggctacaattcagaatcttctgaaccatctatgtaatgaatggggattatacattggaatttttgtcatgacacatttgccaaatcagtaggatatatttgttttggcagcctatcacgcagaggctagtggtatatttatgtaagaaaatgactgtaaatctcaagaaaaatctcagcagctaatagcaactcatttatttcattttggtcttaatgctttgtaaacaggtcaaaaaatactgtcatactctaagcttctattttccacactggacatacttctagttgtattctccatactattagactgtgtagtgatgtgacttccaagtagaatttaatctccccattgagtgtgtcatggtacaaatcactattcgtttttggtgttttttagggatgtgcaatgtgcattacataatgacagaaatactgagaaggttctgtgtgcccatttgaaaggagtgggaggaatacagcagtttgtttttcaacatgaatctgatattgatttaaactgtgtttcacttacaagttttaaaaaaatgacagggtttaatggagcgtgcataaaaatgtactgttttcaccttttgtttatatgtaaatgtttgtaagtatatgggcctatctgtaagtgggtaagtctgtatgtgtgtatcatacacatcaacctccatgtccttagtcctgggtttttgaaaaagtgctaaaacggacaagtagaataaatgttgctgtggaatgccatgctttagaacaaaccctttttgatcttaatgcttctgaaaactaggtctgactctggggatttttttccagccgaaggaaaatcacttccgttatgtccccctctaatttagccgctcgacattttacacaacccggatatgttgtatattttgacccaaagttacaggtaggtttaagagaatttttagccatgacttttggagcactattccattgtcagttattaataaagaattccattgcttagctaaccaacaggttttttttgtttccaagagagttatttgaaaagttaacagaacaatgagataacagtgacagtttaacaaagataaaattctgaactgcgttttattcatttgtgtactatgtgattttttaaatgtcccctttagtatttaatggaaaattggttcctgcaaaagacaaagggtgagagttagcgtcctgtagatacacacagagactaggccgtatattaactagaagcagctttatgtctagcttgtgtctttttgtttgtttgcttgtttgtttttagattcctgagagatgtctctggaagggaaagttttgagaactaatggctatttttgaggacaaaaattacatcttaagctaattccttaaatacatacagtaggtgaattttcaggacaatattgcctcacaaccctgcttacattgaaaagtctttttcccttagctcttctgactggatttttctacaaaactatggaaaatatctttgttcttgtttgctgctattttctgtcctattttgagaaatataaatacatagaaatggtgcatcttaacatttgtttgtacatgtataaatgtcttgtattttaattcatttttagcatgaattgtttaagggtaagccacaacatctagaaatcactcatagatattgaacaataaaggagaatggtaccgatgcaggaggaagcaagcgtgtcttcccctgcagcacacagcgacttgcgttgacaaaggaggaggaaacgattactctgtaaacaaagttatccttacttgggagattgccacagcctgctgctgagttgagttaccagacatcctccatgtgagaagcagcgaacattgaatctcagggatggcccacaactgggtccacatgtaatgagccctgtttaataacgaaggggtgggggagagcagtccgtctacaacctggaatcagatttgcaaaatttcctgcactgctgtctgacactgtcctgttgatgccctttctgactgtgttctctgttttctctgtctgctgtctaaccctgtgccttgcctgggataaggacaatgatgaggttactggtttggattgtaagtagaggacttttattaattggtttagaggttcactgctgctttgtcactttctcaatcaaattggccacttaagaaataaagagctggtagaattgcatcctcagatgattattgactgtgtgtgtgtgtgaaaacagacattccagtgccacccaaatatatatctgtaacgtgcccaagaaatcctagctgcgctcttgagagtgcatgccatggagactggtttagacaccgcgtggagcctagttgcctgttgtcacggcatcttgcactttaggagactaagaccgtcctggttcgtctgtgtgtggtgtgaccaatggtgtgcccagagcactactctcaaaatcactagtgttagcaagtcgtcccgggctggggagcgttcgccgtagtctttggaagctttggctttagatttaccaagccccgcctccccgctgccagtgccctgctctcccgttcgcctctttctgtttctgtgtgaactttcccggtaatatcactcgttaaataggttttctttaaacttaattaaggaaaaactatttaaaggtaaaggatattttgttgacatcggtggctcgatcatccttaagcaactgaagttaaaattgttgaaggaaaaggcacttaaattggttactttcatgtccagctgtatataagtccagtgtgttcatctagatgacgcaaagaatctcctggtagagaagcgacatgtaaaaaactggtggaaaaaggttttggattttttttccagtggggtggggggagggcaagctggatttacaggtcacggctggactgaatgggcctttttatcttcccactgtatcatggaagtagctgcttgcttgtactgtccatccttcaggcatccctaaagctcactctgaagatgttagagacaaacacaaactcttcgagttaaagttgatcctgacactgacatgaaggcaagccttgatttcgtatgaacgttgctgaagtggtaattgaggaaaacagttccccagattgttaagagttcactgaagatattgacacaattttaaaaaatcagtaaaggaatgtatataatattgctctcgtgttttacagtaagatttgttgctctcagactgtgtaaaacaaaatttattcatgttttctgcatattaaaaaatcttattgtaccaactggtaaaccg

SEQ ID NO: 400 - DNA, 737 bp, Homo sapiens
ggagtttcgccgccgcagtcttcgccaccatgccgccctacaccgtggtctatttcccagttcgaggccgctgcgcggccctgcgcatgctgctggcagatcagggccagagctggaaggaggaggtggtgaccgtggagacgtggcaggagggctcactcaaagcctcctgcctatacgggcagctccccaagttccaggacggagacctcaccctgtaccagtccaataccatcctgcgtcacctgggccgcacccttgggctctatgggaaggaccagcaggaggcagccctggtggacatggtgaatgacggcgtggaggacctccgctgcaaatacatctccctcatctacaccaactatgaggcgggcaaggatgactatgtgaaggcactgcccgggcaactgaagccttttgagaccctgctgtcccagaaccagggaggcaagaccttcattgtgggagaccagatctccttcgctgactacaacctgctggacttgctgctgatccatgaggtcctagcccctggctgcctggatgcgttccccctgctctcagcatatgtggggcgcctcagcgcccggcccaagctcaaggccttcctggcctcccctgagtacgtgaacctccccatcaatggcaacgggaaacagtgagggttggggggactctgagcgggaggcagagtttgccttcctttctccaggaccaataaaatttctaagagagct

SEQ ID NO: 401 - DNA, 3115 bp, Homo sapiens
ccaccatatcggtcccgtatttcacattgataaggtcctgtttcatttctcgtgacattgggtagaatgaggatcctgttttcaatgggtcgctttaccctgggactgacagggaggctctgaccatttagccaccaaatgtaggtgtagttctcactcttaggttcaccccgcggccgatcgtcccccatacctcggccatgcggcccctgctgctactggccctgctgggctggctgctgctggccgaagcgaagggcgacgccaagccggaggacaaccttttagtcctcacggtggccactaaggagaccgagggattccgtcgcttcaagcgctcagctcagttcttcaactacaagatccaggcgcttggcctaggggaggactggaatgtggagaaggggacgtcggcaggtggagggcagaaggtccggctgctgaagaaagctctggagaagcacgcagacaaggaggatctggtcattctcttcacagacagctatgacgtgctgtttgcatcggggccccgggagctcctgaagaagttccggcaggccaggagccaggtggtcttctctgctgaggagctcatctacccagaccgcaggctggagaccaagtatccggtggtgtccgatggcaagaggttcctgggctctggaggcttcatcggttatgcccccaacctcagcaaactggtggccgagtgggagggccaggacagcgacagcgatcagctgttttacaccaagatcttcttggacccggagaagagggagcagatcaatatcaccctggaccaccgctgccgtatcttccagaacctggatggagccttggatgaggtcgtgctcaagtttgaaatgggccatgtgagagcgaggaacctggcctatgacaccctcccggtcctgatccatggcaacgggccaaccaagctgcagttgaactacctgggcaactacatcccgcgcttctggaccttcgaaacaggctgcaccgtgtgtgacgaaggcttgcgcagcctcaagggcattggggatgaagctctgcccacggtcctggtcggcgtgttcatcgaacagcccacgccgtttgtgtccctgttcttccagcggctcctgcggctccactacccccagaaacacatgcgacttttcatccacaaccacgagcagcaccacaaggctcaggtggaagagttcctggcacagcatggcagcgagtaccagtctgtgaagctggtgggccctgaggtgcggatggcgaatgcagatgccaggaacatgggcgcagacctgtgccggcaggaccgcagctgcacctactacttcagcgtggatgctgacgtggccctgaccgagcccaacagcctgcggctgctgatccaacagaacaagaatgtcattgccccgctgatgacccggcatgggaggctgtggtcgaacttctggggggctctcagtgcagatggctactatgcccgttccgaggactacgtggacattgtgcaggggcggcgtgttggtgtctggaatgtgccctatatttcaaacatctacttgatcaagggcagtgccctgcggggtgagctgcagtcctcagatctcttccaccacagcaagctggaccccgacatggccttctgtgccaacatccggcagcaggatgtgttcatgttcctgaccaaccggcacacccttggccatctgctctccctagacagctaccgcaccacccacctgcacaacgacctctgggaggtgttcagcaaccccgaggactggaaggagaagtacatccaccagaactacaccaaagccctggcagggaagctggtggagacgccctgcccggatgtctattggttccccatcttcacggaggtggcctgtgatgagctggtggaggagatggagcactttggccagtggtctctgggcaacaacaaggacaaccgcatccagggtggctacgagaacgtgccgactattgacatccacatgaaccagatcggctttgagcgggagtggcacaaattcctgctggagtacattgcgcccatgacggagaagctctaccccggctactacaccagggcccagtttgacctggcctttgtcgtccgctacaagcctgatgagcagccctcactgatgccacaccatgatgcctccaccttcaccatcaacatcgccctgaaccgagtcggggtggattacgagggcgggggctgtcggttcctgcgctacaactgttccatccgagccccaaggaagggctggaccctcatgcaccctggacgactcacgcattaccatgaggggctccccaccaccaggggcacccgctacatcgcagtctccttcgtcgatccctaattggccaggcctgaccctcttggacctttcttctttgccgacaaccactgcccagcagcctctgggacctcggggtcccagggaacccagtccagcctcctggctgttgacttcccattgctcttggagccaccaatcaaagagattcaaagagattcctgcaggccagaggccggaacacacctttatggctggggctctccgtggtgttctggacccagcccctggagacaccattcacttttactgctttgtagtgactcgtgctctccaacctgtcttcctgaaaaaccaaggcccccttcccccacctcttccatggggtgagacttgagcagaacaggggcttccccaagttgcccagaaagactgtctgggtgagaagccatggccagagcttctcccaggcacaggtgttgcaccagggacttctgcttcaagttttggggtaaagacacctggatcagactccaagggctgccctgagtctgggacttctgcctccatggctggtcatgagagcaaaccgtagtcccctggagacagccactccagagaacctcttgggagacagaagaggcatctgtgcacagctcgatcttctacttgcctgtggggaggggagtgacaggtccacacaccacactgggtcaccctgtcctggatgcctctgaagagagggacagaccgtcagaaactggagagtttctattaaaggtcatttaaaccac

SEQ ID NO: 402 - DNA, 3512 bp, Homo sapiens
cgagccacccagctgagaggagaggcgcccccggggacgcactgagattatgaggctctggcctccactggccactcactcgtgaccctttccaccacggcggagccttccaagcctacctcctgccgtgtggtgatctacctgcagcgggagatgtcgggggacacctgcctgtgcccagcctcaggggccaagcccaagctcagtggcttcaagggaggagggttgggcaacaagtatgtccagctcaacgtgggcggctctctgtactacaccactgtgcgggccctgacccgccacgacaccatgctcaaggccatgttcagtgggcgcatggaggtgctgaccgacaaagaaggctggatcctcatagaccgttgtggaaagcactttggcaccattttgaattacctccgagatgacaccatcaccctccctcagaaccggcaagaaatcaaggaattgatggctgaagcaaagtattacctcatccaggggctggtgaatatgtgccagagtgccctgcaggacaagaaggactcctaccagcctgtgtgcaacatccccatcatcacatccctaaaggaggaggagcggctcatcgaatcctccaccaagcccgtggtgaagctgctgtacaacagaagcaacaacaagtattcctacaccagcaactctgacgaccacctgctgaaaaacatcgagctgtttgacaagctctccctgcgcttcaacggccgcgtgctcttcatcaaggatgtcattggtgacgagatctgctgctggtccttttatggccagggccgtaagctggcagaggtgtgctgtacctccatcgtgtatgccacggagaagaagcagaccaaggtggaattcccagaggcccgaatctatgaggagacactcaacgtcctactctatgagactccccgcgtccccgacaactccttgttggaggccacaagccgtagccgcagccaggcttcccccagtgaagatgaggagacctttgaactgcgggaccgtgtccgccgcatccacgtcaagcgctacagcacttacgatgaccggcagctcggccaccagtctacccatcgcgactgaccagaccctcagggagtcagggcacgggaggccctatctcccatcctgtggaacccgccccattggccaccccatgctgctgctgcctgggtctctgctctagcacccagaggcatgacaggccctgctcagaggtcagagggtctgggcagaggagggaccacattcccctgccttgcccctgagcacttctggagactgcgtcctgtcctatctgctcaccatcacccttcctgcccgacggagctgcttctgctccctggggcatatggactgacccacctcctgctgagaaccttcccctaggccctgtgcagaagggctactgccccttaggcctcagctgggggaaaggcagttctggtgctgtagaggccctggtgcagaaagtgggacgtcctttttcctaaggtgtttaagcacaggcttgataagtttggtttttaaaaaataatctaggaaatgaataattctaaatctagtaatgaggaaactgagcatttcttttgccctccagggtgccaagaccctacatatgacagaacccttggcccttctccatgcctgtgggatctgtttctttaaagcactttgtactgttattcaggaggttgataatctccttgacccatgtctttctaccctaatccccacttccctgcagaatcaatctgagggaggggataaagaggaagcaataaaaaaaaaacatccgacagagcagctctggctttgccagcctggccagcagctcagagtgcaccgaggagggaaggatggctaagctgggaccggcagtcctcacagggtgcctgtgagaaaggacattttacccccacatcatagtcacatcactgactcctaggtctagcacgactgctctttgtgatcctcttgagtacccttggcttccagccatgctgtcctcacatacggtaaagccaaagagctgtcacatgggccagaaacatgagccacggcaggaagaccgtggagcccgtgggcactgcatggtgttggctggcatgcccatcagctgaggacagcaaactcccagcagcccctacagaggtggcacatgcttggccacacatctactccctgcccacaccatctatgctcttggttggtgctggctgggatggcggttctgcccagtggtgtctctgagcgcgggatgacaggagcaaccgaagcaccctgaaggccttcactccttgttgggtaactcagccatggagatgccaagcactagccaggaggtgagttcctctttagggctttggttttcattcctttttgtttggcttggccaaaccagaattcagcttatctgaattattttccaaaggaatgctgtcagggagggactgttctgccagcctaacaaagcaacgtagccacgtatagtacccacttctgctctttggagagaacacaggttatcaagttcatctctcttgactactcttatgatagctgatgccacagagcctatgggcaaatgccagacccagggttagacacaaggacctgaagtgacatgacggcgggacaggggaaatgtgactttctaattaggcattttatgttagtcacagtcttgaatgtataaacagcactaagactctcaggtcaggtaccttggtgatcagctactagttcttccagccctcattgaggtaacaagataaagacaaatccacttctttggccaaattcaggctttggctttatgactttcccacagagactggaatgcgtcagcctgagaccactggcctattttctcagctgccctcttgaggtcctttaacactcaaattcccagctccccactgaggtgttgtgatgcttgccttttgacctccccatcccctttagtccctgcttactactttgacattcacatcctcagtgtctcagtcttttttgccgagaaagcacagtagtctgggactgggcatttatcttctctgactgaaaatctctccttggtcttaaggaaaatactaacattgaactcactgacatgatcttagcttctttaatcagactttgtgacttaaaagtttgggggttttctttgaaagtttccagccctattcagaaagcaactcttggctgtgtgcatttttcaactccaagcagcccaggggtaagtaaacaaagtatggatgaaggtcagattttcttgtcagtttctgagaaacctggcagcctgctgttaacaacacaggccagtattgggttttattgaatttggtatgtgaccaaggtcggcctaaaggatggcgcaggtcctgggcaggaaagaatttttcctttatcacataactgtaatatttggttgctcagcataagtgatggaagcaaacactaatttctaataaaattgtgttaaactc

SEQ ID NO: 403 - DNA, 1370 bp, Homo sapiens
ggcggcggcagctgtacagggcgggagaagcggtggtagcggaggctgtagtggggctggtggtgcttccaactgcgggacaggaagtggccgtagcggcttgttggataagtggaagatagatgataagcctgtaaaaattgacaagtgggatggatcagctgtgaaaaactctttggatgattctgccaaaaaggtacttctggaaaaatacaaatatgtggagaattttggtctaattgatggtcgcctcaccatctgtacaatctcctgtttctttgccatagtggctttgatttgggattatatgcacccctttccagagtccaaacccgttttggctttgtgtgtcatatcctattttgtgatgatggggattctgaccatttatacctcatataaggagaagagcatctttctcgtggcccacaggaaagatcctacaggaatggatcctgatgatatttggcagctgtcctccagtcttaaaaggtttgatgacaaatacaccttgaagctgaccttcatcagtgggagaacaaagcagcagcgggaagccgagttcacaaagtccattgctaagttttttgaccacagtgggacactggtcatggatgcatatgagcctgaaatatccaggctccatgacagtcttgccatagaaagaaaaataaagtagccaattctaaaagtagccctctttctcctggatcttgctgaattagtggcttggggggtgggggagataaaaagaacttaaaatgggtaaagtaagaaatgttaaaaagtccctgttttgtcctgaaattttagtctattctgggtaaataggattttctgacacagatatgagaagttgtagctctgatgtctagctgtagtctccttgatctgctgattgcattattttaatttgcttttctgggaaagcagttttgctaaaagctgtacagactttttcttttgtacctagcagtactttatatagtatagctttgggccatgtagcattttaagactcaattttaaaaaattattaatctgttgctgactcttaattcctatttcaatatgtgtttccttgaagaattcaggatacaacttcttgtgtatgacagctttccttcacacactatttttgtgggtgtgtatatatctgatttgggaagaatttaaaaaacacatagctttttaatttgtttgaaacagactttctgcctgttacatttttgcttttaaccaattaaagaagccaatggcattttagttttatattgtgttttccactagtatatccctgttgatttgtttgtgccttttattaactgccattttctaaaatttttttcaataaaaggaaggaagatgtg

SEQ ID NO: 404 - DNA, 3088 bp, Homo sapiens
acaaaaaagcttttacgaggtatcagcacttttctttcattagggggaaggcgtgaggaaagtaccaaacagcagcggagttttaaactttaaatagacaggtctgagtgcctgaacttgccttttcattttacttcatcctccaaggagttcaatcacttggcgtgacttcactacttttaagcaaaagagtggtgcccaggcaacatgggtgactggagcgccttaggcaaactccttgacaaggttcaagcctactcaactgctggagggaaggtgtggctgtcagtacttttcattttccgaatcctgctgctggggacagcggttgagtcagcctggggagatgagcagtctgcctttcgttgtaacactcagcaacctggttgtgaaaatgtctgctatgacaagtctttcccaatctctcatgtgcgcttctgggtcctgcagatcatatttgtgtctgtacccacactcttgtacctggctcatgtgttctatgtgatgcgaaaggaagagaaactgaacaagaaagaggaagaactcaaggttgcccaaactgatggtgtcaatgtggacatgcacttgaagcagattgagataaagaagttcaagtacggtattgaagagcatggtaaggtgaaaatgcgaggggggttgctgcgaacctacatcatcagtatcctcttcaagtctatctttgaggtggccttcttgctgatccagtggtacatctatggattcagcttgagtgctgtttacacttgcaaaagagatccctgcccacatcaggtggactgtttcctctctcgccccacggagaaaaccatcttcatcatcttcatgctggtggtgtccttggtgtccctggccttgaatatcattgaactcttctatgttttcttcaagggcgttaaggatcgggttaagggaaagagcgacccttaccatgcgaccagtggtgcgctgagccctgccaaagactgtgggtctcaaaaatatgcttatttcaatggctgctcctcaccaaccgctcccctctcgcctatgtctcctcctgggtacaagctggttactggcgacagaaacaattcttcttgccgcaattacaacaagcaagcaagtgagcaaaactgggctaattacagtgcagaacaaaatcgaatggggcaggcgggaagcaccatctctaactcccatgcacagccttttgatttccccgatgataaccagaattctaaaaaactagctgctggacatgaattacagccactagccattgtggaccagcgaccttcaagcagagccagcagtcgtgccagcagcagacctcggcctgatgacctggagatctagatacaggcttgaaagcatcaagattccactcaattgtggagaagaaaaaaggtgctgtagaaagtgcaccaggtgttaattttgatccggtggaggtggtactcaacagccttattcatgaggcttagaaaacacaaagacattagaatacctaggttcactgggggtgtatggggtagatgggtggagagggaggggataagagaggtgcatgttggtatttaaagtagtggattcaaagaacttagattataaataagagttccattaggtgatacatagataagggctttttctccccgcaaacacccctaagaatggttctgtgtatgtgaatgagcgggtggtaattgtggctaaatatttttgttttaccaagaaactgaaataattctggccaggaataaatacttcctgaacatcttaggtcttttcaacaagaaaaagacagaggattgtccttaagtccctgctaaaacattccattgttaaaatttgcactttgaaggtaagctttctaggcctgaccctccaggtgtcaatggacttgtgctactatatttttttattcttggtatcagtttaaaattcagacaaggcccacagaataagattttccatgcatttgcaaatacgtatattctttttccatccacttgcacaatatcattaccatcactttttcatcattcctcagctactactcacattcatttaatggtttctgtaaacatttttaagacagttgggatgtcacttaacattttttttttttgagctaaagtcagggaatcaagccatgcttaatatttaacaatcacttatatgtgtgtcgaagagtttgttttgtttgtcatgtattggtacaagcagatacagtataaactcacaaacacagatttgaaaataatgcacatatggtgttcaaatttgaacctttctcatggatttttgtggtgtgggccaatatggtgtttacattatataattcctgctgtggcaagtaaagcacactttttttttctcctaaaatgtttttccctgtgtatcctattatggatactggttttgttaattatgattctttattttctctcctttttttaggatatagcagtaatgctattactgaaatgaatttcctttttctgaaatgtaatcattgatgcttgaatgatagaattttagtactgtaaacaggctttagtcattaatgtgagagacttagaaaaaatgcttagagtggactattaaatgtgcctaaatgaattttgcagtaactggtattcttgggttttcctacttaatacacagtaattcagaacttgtattctattatgagtttagcagtcttttggagtgaccagcaactttgatgtttgcactaagattttatttggaatgcaagagaggttgaaagaggattcagtagtacacatacaactaatttatttgaactatatgttgaagacatctaccagtttctccaaatgccttttttaaaactcatcacagaagattggtgaaaatgctgagtatgacacttttcttcttgcatgcatgtcagctacataaacagttttgtacaatgaaaattactaatttgtttgacattccatgttaaactacggtcatgttcagcttcattgcatgtaatgtagacctagtccatcagatcatgtgttctggagagtgttctttattcaataaagttttaatttagtataaacat

SEQ ID NO: 405 - DNA, 2908 bp, Homo sapiens
atgtgggcgctttgctcgctgctgcggtccgcggccggacgcaccatgtcgcagggacgcaccatatcgcaggcacccgcccgccgcgagcggccgcgcaaggacccgctgcggcacctgcgcacgcgagagaagcgcggaccgtcggggtgctccggcggcccaaacaccgtgtacctgcaggtggtggcagcgggtagccgggactcgggcgccgcgctctacgtcttctccgagttcaaccggtatctcttcaactgtggagaaggcgttcagagactcatgcaggagcacaagttaaaggttgctcgcctggacaacatattcctgacacgaatgcactggtctaatgttgggggcttaagtggaatgattcttactttaaaggaaaccgggcttccaaagtgtgtactttctggacctccacaactggaaaaatacctcgaagcaatcaaaatattttctggtccattgaaaggaatagaactggctgtgcggccccactctgccccagaatacgaggatgaaaccatgacagtttaccagatccccatacacagtgaacagaggaggggaaagcaccaaccatggcagagtccagaaaggcctctcagcaggctcagtccagagcgatcttcagactccgagtcgaatgaaaatgagccacaccttccacatggtgttagccagagaagaggggtcagggactcttccctggtcgtagctttcatctgtaagcttcacttaaagagaggaaacttcttggtgctcaaagcaaaggagatgggcctcccagttgggacagctgccatcgctcccatcattgctgctgtcaaggacgggaaaagcatcactcatgaaggaagagagattttggctgaagagctgtgtactcctccagatcctggtgctgcttttgtggtggtagaatgtccagatgaaagcttcattcaacccatctgtgagaatgccacctttcagaggtaccaaggaaaggcagatgcccccgtggccttggtggttcacatggccccagcatctgtgcttgtggacagcaggtaccagcagtggatggagaggtttgggcctgacacccagcacttggtcctgaatgagaactgtgcctcagttcacaaccttcgcagccacaagattcaaacccagctcaacctcatccacccggacatcttccccctgctcaccagtttccgctgtaagaaggagggccccaccctcagtgtgcccatggttcagggtgaatgcctcctcaagtaccagctccgtcccaggagggagtggcagagggatgccattattacttgcaatcctgaggaattcatagttgaggcgctgcagcttcccaacttccagcagagcgtgcaggagtacaggaggagtgcgcaggacggcccagccccagcagagaaaagaagtcagtacccagaaatcatcttccttggaacagggtctgccatcccgatgaagattcgaaatgtcagtgccacacttgtcaacataagccccgacacgtctctgctactggactgtggtgagggcacatttgggcagctgtgccgtcattacggagaccaggtggacagggtcctgggcaccctggctgctgtgtttgtgtcccacctgcacgcagatcaccacacgggcttgccaagtatcttgctgcagagagaacgcgccttggcatctttgggaaagccgcttcaccctttgctggtggttgcccccaaccagctcaaagcctggctccagcagtaccacaaccagtgccaggaggtcctgcaccacatcagtatgattcctgccaaatgccttcaggaaggggctgagatctccagtcctgcagtggaaagattgatcagttcgctgttgcgaacatgtgatttggaagagtttcagacctgtctggtgcggcactgcaagcatgcgtttggctgtgcgctggtgcacacctctggctggaaagtggtctattccggggacaccatgccctgcgaggctctggtccggatggggaaagatgccaccctcctgatacatgaagccaccctggaagatggtttggaagaggaagcagtggaaaagacacacagcacaacgtcccaagccatcagcgtggggatgcggatgaacgcggagttcattatgctgaaccacttcagccagcgctatgccaaggtccccctcttcagccccaacttcagcgagaaagtgggagttgcctttgaccacatgaaggtctgctttggagactttccaacaatgcccaagctgattcccccactgaaagccctgtttgctggcgacatcgaggagatggaggagcgcagggagaagcgggagctgcggcaggtgcgggcggccctcctgtccagggagctggcaggcggcctggaggatggggagcctcagcagaagcgggcccacacagaggagccacaggccaagaaggtcagagcccagtgaagatctgggagaccctgaactcagaaggctgtgtgtcttctgccccacgcacgcacccgtatctgccctccttgctggtagaagctgaagagcacggtcccccaggaggcagctcaggataggtggtatggagctgtgccgaggcttgggctcccacataagcactagtctatagatgcctcttaggactggtgcctggcacagccgcgggccaggaggctgccacacggaagcaagcagatgaactaatttcatttcaaggcagtttttaaagaagtcttggaaacagacggcggcacctttcctctaatccagcaaagtgattccctgcacaccagagacaagcagagtaacaggatcagtgggtctaagtgtccgagacttaacgaaaatagtatttcagctgcaataaagattgagtttgcaa

SEQ ID NO: 406 - DNA, 1209 bp, Homo sapiens
cgaagcgaggagcagcgatggacggtcgggtgcagctgataaaggccctcctggccttgccgatccggcctgcgacgcgtcgctggaggaacccgattccctttcccgagacgtttgacggcgataccgaccgactcccggagttcatcgtgcagacgggctcctacatgttcgtggacgagaacacgttctccagcgacgccctgaaggtgacgttcctcatcacccgcctcacagggcccgccctgcagtgggtgatcccctacatcaagaaggagagccccctcctcaatgattaccggggctttctggccgagatgaagcgagtctttggatgggaggaggacgaggacttctaggccgggagaccctcgggcctgggggcgggtgctctggggagggtccgctgtgttactggccgccgccagggtcgccaccggcgccctccctccgcgcctccctccccctcgagccgccgcgatgtcccctgcgctcctgttccctcccgcgtagtgcttgcctttgttccaggaatagcgctccaggctcctgctgccgcccctgggcctcactctggagcgagccgccgccctctccttccagccagccagcccctcccatgtacatttggacgctgtcctgcgctccagctgcaagctgggctcctgttacacactggacagaccacccactgccgccgctgccaagccctctcctccccaccagactgccagacgactacatcattctgcccacagacctgcgctgccacagccatcgccatccatcgcatcccaccgacagactgctgctcctagtgatctggactcacctcggaggtatctgggctggccacagtccctggacagtgatccagacagctggccgccccccaagggatctgtcaccttcagcgagacctatttcctccccacccccagaaacctcttgtgttcttgcctaggcccaggtgttcctggcagccaaatcgagtctctcattttctcttgtggaccagttagttttgcccataacgcagtattctgagtttgcaactgtctctctgatgtgtgccttttgttcaacacagtaacccctgcattctgctctgctctaatacactacctggagaaagtcttttccttattttcaataaatgtcagacattattgaaaagaaaaaaaaaaaaaaaaaaaaaaaaaaaaaaaa

SEQ ID NO: 407 - DNA, 1750 bp, Homo sapiens
gtggccgccgtcgcccggatcccctgagctgcccgccatcccacgtgaccgcgccgccccccagctccaccgctgagcccgctcgccatggccctcttcggggccctcttcctagcgctgctggcaggcgcacatgcagagttcccaggctgcaagatccgcgtcacctccaaggcgctggagctggtgaagcaggaggggctgcgctttctggagcaagagctggagactatcaccattccggacctgcggggcaaagaaggccacttctactacaacatctctgaggtgaaggtcacagagctgcaactgacatcttccgagctcgatttccagccacagcaggagctgatgcttcaaatcaccaatgcctccttggggctgcgcttccggagacagctgctctactggttcttctatgatgggggctacatcaacgcctcagctgagggtgtgtccatccgcactggtctggagctctcccgggatcccgctggacggatgaaagtgtccaatgtctcctgccaggcctctgtctccagaatgcacgcggccttcgggggaaccttcaagaaggtgtatgattttctctccacgttcatcacctcagggatgcgcttcctcctcaaccagcagatctgccctgtcctctaccacgcagggacggtcctgctcaactccctcctggacaccgtgcctgtgcgcagttctgtggacgagcttgttggcattgactattccctcatgaaggatcctgtggcttccaccagcaacctggacatggacttccggggggccttcttccccctgactgagaggaactggagcctccccaaccgggcagtggagccccagctgcaggaggaagagcggatggtgtatgtggccttctctgagttcttcttcgactctgccatggagagctacttccgggcgggggccctgcagctgttgctggtgggggacaaggtgccccacgacctggacatgctgctgagggccacctactttgggagcattgtcctgctgagcccagcagtgattgactccccattgaagctggagctgcgggtcctggccccaccgcgctgcaccatcaagccctctggcaccaccatctctgtcactgctagcgtcaccattgccctggtcccaccagaccagcctgaggtccagctgtccagcatgactatggacgcccgtctcagcgccaagatggctctccgggggaaggccctgcgcacgcagctggacctgcgcaggttccgaatctattccaaccattctgcactggagtcgctggctctgatcccattacaggcccctctgaagaccatgctgcagattggggtgatgcccatgctcaatgagcggacctggcgtggggtgcagatcccactacctgagggcatcaactttgtgcatgaggtggtgacgaaccatgcgggattcctcaccatcggggctgatctccactttgccaaagggctgcgagaggtgattgagaagaaccggcctgctgatgtcagggcgtccactgcccccacaccgtccacagcagctgtctgagccctcaatccccaagctggcagctgtcattcaggaccccaacccctctcagcccctcttttcccacattcatagcctgtagtgccccctctaacccccagtgccacagagaagacgggatttgaagctgtacccaatttaattccataatcaatctatcaattacagtccgtccaccacc

SEQ ID NO: 408 - DNA, 1652 bp, Homo sapiens
tcccgacgagcaacgcgtttgtagaggggtgggtgcgcacgctctgtccctgcgtgaccttccgaccccgctgtcctcaccgcaatggcggctgtgagggccctggtggcctcgaggctcgctgcggcatctgcattcacgtccctgtcccccggcggtcggacgccttcccagcgcgcagcccttcacctctccgtgccgcgccccgcggccagggtcgcgctggtgctgtctggatgcggagtctacgatgggaccgagatccacgaggcctcggcgatcctggtgcacctgagccgtggaggggctgaagtccagatctttgctcctgacgtccctcagatgcacgtgattgaccacaccaaggggcagccgtccgaaggcgagagcaggaatgttttgaccgagtctgcgaggatcgcccgtggcaaaatcacagacctggccaacctcagtgcagccaaccatgatgctgccatctttccaggaggctttggagcggctaaaaacctgagcacgtttgccgtggacgggaaagattgcaaggtgaataaagaagtggagcgtgtcctgaaggagttccaccaggccgggaagcccatcggcttgtgctgcattgcacctgtcctcgcggccaaggtgctcagaggcgtcgaggtgactgtgggccacgagcaggaggaaggtggcaagtggccttatgccgggaccgcagaggccatcaaggccctgggtgccaagcactgcgtgaaggaagtggtcgaagctcacgtggaccagaaaaacaaggtggtcacgaccccagccttcatgtgcgagacggcactccactacatccatgatgggatcggagccatggtgaggaaggtgctggaactcactggaaagtgacgcgcatggacggggcccagctaggcgccaggacttggcctcaccctctggctgaggagctgtcggctgctttccatccagctgggagtctggcaggcccttttttttttttctttgccgaaacctgcaggcgttctctctctaaggaggatgtgctgcagtgcatgggggatgtttcttcctgggtgtggctgggctgctctcacatacagaggccgaggggccaattcgttctctgccacagggacttgcctcactgtgtcccaaaaacaaatcgcagccagcttttccagaaatagaaaattctgccgtctgaggttttatacttcaggttagttagtttttggaaggaagaacatttttaggtttgcaagcctcctgatcaggaaaccagaaataccacatttatggaccatgaaaggttggttcttgactctgaagggacttttgagttaatcagcgtaaggggatttctaaagcaggcaatccctgtagccgcagagaataaacgccttcccaaaatggcaacttcccacagccacatttcagacctgctgagactgctgagtgaggaatggcagtgaggtttcttcaattagtctcagttctcttaattttcaggaagaaagggaaattgcagctcctcagcccccaggattgacctctggggagtgatggtagcgttggtgccaggccgtgggttcaggtgtggcagaagcttgcagatgcgtccgaagggaaataaagtgtgttggcgttag

SEQ ID NO: 409 - DNA, 1399 bp, Homo sapiens
ttgccggcgcaagagccaagccgccagcgctgctatgtgggccacgctgccgctgctctgcgccggggcctggctcctgggagtccccgtctgcggtgccgccgaactgtccgtgaactccttagagaagtttcacttcaagtcatggatgtctaagcaccgtaagacctacagtacggaggagtaccaccacaggctgcagacgtttgccagcaactggaggaagataaacgcccacaacaatgggaaccacacatttaaaatggcactgaaccaattttcagacatgagctttgctgaaataaaacacaagtatctctggtcagagcctcagaattgctcagccaccaaaagtaactaccttcgaggtactggtccctacccaccttccgtggactggcggaaaaaaggaaattttgtctcacctgtgaaaaatcagggtgcctgcggcagttgctggactttctccaccactggggccctggagtctgcaatcgccatcgcaaccggaaagatgctgtccttggcggaacagcagctggtggactgcgcccaggacttcaataattacggctgccaagggggtctccccagccaggctttcgagtatatcctgtacaacaaggggatcatgggtgaagacacctacccctaccagggcaaggatggttattgcaagttccaacctggaaaggccatcggctttgtcaaggatgtagccaacatcacaatctatgacgaggaagcgatggtggaggctgtggccctctacaaccctgtgagctttgcctttgaggtgactcaggacttcatgatgtatagaacgggcatctactccagtacttcctgccataaaactccagataaagtaaaccatgcagtactggctgttgggtatggagaaaaaaatgggatcccttactggatcgtgaaaaactcttggggtccccagtggggaatgaacgggtacttcctcatcgagcgcggaaagaacatgtgtggcctggctgcctgcgcctcctaccccatccctctggtgtgagccgtggcagccgcagcgcagactggcggagaaggagaggaacgggcagcctgggcctgggtggaaatcctgccctggaggaagttgtggggagatccactgggacccccaacattctgccctcacctctgtgcccagcctggaaacctacagacaaggaggagttccaccatgagctcacccgtgtctatgacgcaaagatcaccagccatgtgccttagtgtccttcttaacagactcaaaccacatggaccacgaatattctttctgtccagaagggctactttccacatatagagctccagggactgtcttttctgtattcgctgttcaataaacattgagtgagcacctcca

SEQ ID NO: 410 - DNA, 5356 bp, Homo sapiens
cgggattcggctggctctgccacaccaccgcgcgcccccgctccgcccgcccctccgggcgcgtcttttccgggctcgcgctgagtcccgcctccgccggctgtccgggtgcgcgcgcgccgctgcggctttttctctggcctccgccgcgcgctcctcctcgtcccagcgctagcgggcacgcggttcctttttgcgagctttccgagtgccaggcgccggccggctgcgaagacgcggtgggccgcccctccgattgaaatcacagaagatattcgtgttcttcttaagagaaaaagaggacattttagctttctcagttgaaggcgtactttattgtcggcttccaaagattactaacttttatctgtatcactaagattgaactgccttggctgtactgctattcttactgctgcttctattattgccttcttcagcacaataaggctttcaaaagccaaagaataacaagaaataagcaccattttagaagcctttccactatgaaacttaagctaaatgtgctcaccattattttgctgcctgtccacttgttaataacaatatacagtgcccttatatttattccatggtattttcttaccaatgccaagaagaaaaacgctatggcaaagagaataaaagctaagcccacttcagacaaacctggaagtccatatcgctctgtcacacacttcgactcactagctgtaatagacatccctggagcagatactctggataaattatttgaccatgctgtatccaagtttgggaagaaggacagccttgggaccagggaaatcctaagtgaagaaaatgaaatgcagccaaatggaaaagtttttaagaagttaattcttgggaattataaatggatgaactatcttgaagtgaatcgcagagtgaataactttggtagtggactcactgcactgggactaaaaccaaagaacaccattgccatcttctgtgagaccagggccgaatggatgattgcagcacagacctgctttaagtacaactttcctcttgtgactttatatgccacacttggcaaagaagcagtagttcatgggctaaatgaatctgaggcttcctatctgattaccagtgttgaacttctggaaagtaaacttaagactgcattgttagatatcagttgtgttaaacatatcatttatgtggacaataaggctatcaataaagcagagtaccctgaaggatttgagattcacagcatgcaatcagtagaagagttgggatctaacccagaaaacttgggcattcctccaagtagaccaacgccttcagacatggccattgttatgtatactagtggttctactggccgacctaagggagtgatgatgcatcatagcaatttgatagctggaatgacaggccagtgtgaaagaatacctggactgggaccgaaggacacatatattggctacttgcctttggctcatgtgctagaactgacagcagagatatcttgctttacctatggctgcaggattggatattcttctccgcttacactctctgaccagtccagcaaaattaaaaaaggaagcaaaggagactgtactgtactgaagcccacacttatggctgctgttccggaaatcatggatagaatttataagaatgttatgagcaaagtccaagagatgaattatattcagaaaactctgttcaagatagggtatgattacaaattggaacagatcaaaaagggatatgatgcacctctttgcaatctgttactgtttaaaaaggtcaaggccctgctgggagggaatgtccgcatgatgctgtctggaggggccccgctatctcctcagacacaccgattcatgaatgtctgcttctgctgcccaattggccagggttatggactgacagaatcatgtggtgctgggacagttactgaagtaactgactatactactggcagagttggagcacctcttatttgctgtgaaattaagctaaaagactggcaagaaggcggttatacaattaatgacaagccaaaccccagaggtgaaatcgtaattggtggacagaacatctccatgggatattttaaaaatgaagagaaaacagcagaagattattctgtggatgaaaatggacaaaggtggttttgcactggtgatattggagaattccatcccgatggatgtttacagattatagatcgtaagaaagatctagtgaagttacaagcaggagagtatgtatctcttgggaaagtagaagctgcactgaagaattgtccacttattgacaacatctgtgcttttgccaaaagtgatcagtcctatgtgatcagttttgtggttcctaaccagaaaaggttgacacttttggcacaacagaaaggggtagaaggaacttgggttgatatctgcaataatcctgctatggaagctgaaatactgaaagaaattcgagaagctgcaaatgccatgaaattggagcgatttgaaattccaatcaaggttcgattaagcccagagccatggacccctgaaactggtttggtaactgatgctttcaaactgaaaaggaaggagctgaggaaccattacctcaaagacattgaacgaatgtatgggggcaaataaaatgttgttgtcttattgacagttgtgcaggaggtagcctggtggttttcaacctctagaattttaagcctttgttgaactgttagaatgtaaggtatatcattctaaagatagagtaaaaagaaaacaaaaccaaaagttattaaaattgttgtccggtttactttaacttagttttgcatagttctagtgcagctgaaattgaaaagttatttccctttagctgtgttattatagagcagaaattctgtttttaaaaattagcctaagatatacttgtttttgtaaagaaaaatatttaatgttgaacaaaataaattggagttggagtagaatgtagtttgaggaaatttgcagcttccaatgcctcttgtcttcctatttcagaagtttaaatattaagcatgacagaaaatatgtattaacactactcaaagcaaaagtgctgcagggctttaaaattctcttccaaccatttatcttgaaggaaaaattcaatagtaatataatacacaaaatcaaataataccttagaaggtattaagattataattgttgcataggttagatatagagtcattgtaatgttgtgaataattacagtgcctaaaataagaatagaacaacatatacaacaccaaaaaatatctagtaatatatttaaagggaaattgagctgctttttttgaaactttgagatctaaaaataactgtaattatttgaatgactaagaggaaagtacattttttgaaatgctgaaaattgcctttctgtgtttattcaaactgaaaagctgagaccaagagcaaggaaggtaaaaagttaacaggcaaacattttctcttagaaaaggtgataaaatcataagtatttggaattagaacccttgcacagcactgaacctgggaaagagatttaaactctgaatttatctttgataacagggattgattttaaaatgtacatgtattaaattacatttgtaatttaaggtctgtttgctgttgctgattttattcttgatcagtagtttgcatttcagaaagcctttcattttgctttaagtttagcaaagcggggttataatgaatgacttccccaatatcttgcttgaacttacagtgattaacttggatgagttttgggaagttaaagggaagaaaacactgttatcattttttcctgtttgggaagagcttagaaactggaaatactagatttgggagaagggcagagttacttgataagggacttgatgtttgtgcagtaacttgggagtgtggtttctttttgaatctttaattaaaacctgggattatatatccctgataaatattcacacttgaaccatagttactgtaaaatgcaaaaaatcttaatactgttattctttgcactttttcttaatcattttttatatatatgcatatatatatgtgtgtgtgtgtgttgcttatgttgttttgtacagatgtgggccaccattgcaacaaaatacattctttttgctctaaaatatttatgaagaaaatacttaaatgttatgtatatggtggtaataagggaaaaatcaagtattataaacaagaatgaaggtttttgtaaagatttctgttcagcgttttgcaaggtaaaattttaggcaagttttccctgaagttatgtgtatgtgagtattctcattcttcccaacttgcctttgaagagtgaaataccattattatcaagtagactactgttcagcttttattccttccctggttgtttatcccttaggaatgagtttcttagactttcccaatatgtgattttttttcccatttagaatggtgattttaaatgtgtgagtgcatgtactatcttatctcagatatttgcacccccaatctgcccccaactcccaaaagctagaacactgccaactgatctgttataggtcctttagaaacacataattaacacttaaggttgggtgctgctaattctttgcaaaaatccaaatattgttaagggaccagggagatgccactaccccttgattttccatctaaaaatatacatgtttatgtaaacaaatctttccatatccatagtgacttttcaagtatttaagcctaaagattttgatctcacatttttatacctgtttaaattgctcacagttattacatacacatcagccatcaactaaagttgtactttaaaaatttactacaatatgtacatttctaagtcaaacacttgtgacttttgctttaattccatgaatgttcctgcctccttgatatttgtatttattctttttttctctagagtagaggtataattgtgtgatatttcagaaatacagataaatgattcaaaaagtcacagttaaggagaatcatgtttctttgatcatgaataactgattagtaagtcttgcctatattttcctgatagcatatgacaaatgtttctaaggtaacaagatgagaacagataaagattgtgtggtgttttggatttggagagaaatattttaatttttaaatgcagttacaaattataatgtattcatatttgtactttctgttaaaatgcatgattgcagaattgtttagattttgtgtttattcttgatgaaaagctttgtttgttcttgtttttaagtttgcactcaaatcttaagaaataaatccacccatgttatcaaaaaaaaaaaaaaaaaaaa

SEQ ID NO: 411 - DNA, 3900 bp, Homo sapiens
cgatggccctgcccagtcccagacagaacctactacgtgcggcggcagctggggcgggaaggcgggcgctgggggcgctgcggccgctgcagcgcagggtccacctggtcggctgcacctgtggaggaggaggtggatttcaggcttcccgtagactggaagaatcggctcaaaaccgcttgcctcgcaggggctgagctggaggcagcgaggccgcccgacgcaggcttccggcgagacatggcagggcaaggatggcagcccggcggcagggcccggcgaggagcgcgaacccgcggccgcagttcccaggcgtctgcgggcgcgagcacgccgcgaccctgcgtgcgccggggcgggggggcggggcctcgcctgcacaaatagggacgagggggcggggcggccacaatttcgcgccaaacttgaccgcgcgttctgctgtaacgagcgggctcggaggtcctcccgctgctgtcatggttggttcgctaaactgcatcgtcgctgtgtcccagaacatgggcatcggcaagaacggggacctgccctggccaccgctcaggaatgaattcagatatttccagagaatgaccacaacctcttcagtagaaggtaaacagaatctggtgattatgggtaagaagacctggttctccattcctgagaagaatcgacctttaaagggtagaattaatttagttctcagcagagaactcaaggaacctccacaaggagctcattttctttccagaagtctagatgatgccttaaaacttactgaacaaccagaattagcaaataaagtagacatggtctggatagttggtggcagttctgtttataaggaagccatgaatcacccaggccatcttaaactatttgtgacaaggatcatgcaagactttgaaagtgacacgttttttccagaaattgatttggagaaatataaacttctgccagaatacccaggtgttctctctgatgtccaggaggagaaaggcattaagtacaaatttgaagtatatgagaagaatgattaatatgaaggtgttttctagtttaagttgttccccctccctctgaaaaaagtatgtatttttacattagaaaaggttttttgttgactttagatctataattatttctaagcaacttgtttttattccccactactcttctctctatcagataccatttatgagacattcttgctataactaagtgcttctccaagaccccaactgagtccccagcacctgctacagtgagctgccattccacacccatcacatgtggcactcttgccagtccttgacattgtcgggcttttcacatgttggtaatatttattaaagatgaagatccacatacccttcaactgagcagtttcactagtggaaataccaaaagcttcctacgtgtatatccagaggtttgtagataaatgttgccaccttgtttgtaacagtgaaaaattgaaaacaacctggaagtccagtgatgggaaaatgagtatgtttctgtcttagattggggaacccaaagcagattgcaagactgaaatttcagtgaaagcagtgtatttgctaggtcataccagaaatcatcaattgaggtacggagaaactgaactgagaaggtaagaaaagcaatttaaagtcagcgagcaggttctcattgataacaagctccatactgctgagatacagggaaatggaggggggaaagctggagtattgatcccgcccccctccttggttgtcagctccctgtcctgtgtgtgggcggaacatagtccagctgctctatagcaagtctcaggtgtttgcagtaagaagctgctggcatgcacgggaacagtgaatgccaaacacttaaagcaattcgatgtttaagtatgtaagttcttttttttttagacagcgtttcgctcttgttgcccaggctagcatgcaatggtgtgacctcggcttactgcaacctccgccttcccagattcaagcgattctcctgcctcaggctcccaagtagctaggaccaggtgcgcgccaccacgcccggctaatttttgtattttgtatttttagtagagatggggtttcaccatgttggtcaggctagtctcgaactcgtgaccgcaagcgattcacccacctcagcctcccaaagtgctgggattaccggcttgagccaccacacccggcacatcttcattctttttatgtagtaaaaagtataaggccacacatggtttatttgaagtattttataatttaaaaaaatacagaagcaggaaaaccaattataagttcaagtgagggatgatggttgcttgaaccaaagggttgcatgtagtaagaaattgtgatttaagatatattttaaagttataagtagcaggatattctgatggagtttgactttggttttgggcccagggagtttcagatgcctttgagaaatgaatgaagtagagagaaaataaaagaaaaaccagccaggcacagtggctcacacctgtaatcccagcgctttgggaggctaaggcaggcagatcacttgagaccagcttgggcaacatggcaaagccccatctctacaaaaaacacaaaaattagctgggcattgtggcgcacacctgtattcccatctagtcaggaagctgagatggaagaattaattgagcccacgagttcaaggctgcagtgagtcgtgattgtgccactgcactccagccggggtgacagaagagaccttgtctcgaaaacgaatctgaaaacaatggaaccatgccttcataattctagaaagttattttcaactgataaatctatattcacccaaataatcaagggtgaaggtaaaataatacatttttagacaagcaaagactcaggggttacctccatgtgccctttttagggaagctgttggagaaaatactccagcaaaatgaaggagtacacaaaccagagaatgacatgaatccagcaaataggatccaacacaggcaatattccagctatggagctagctttaaaaaggaacagtaaaaatattaatcggttagctgggtggaatggcccatgcctgtagtcccagctactcaggaggctcagcagcaggacgacttgagcccaagagttccagaccagcctggccaccttagtgagatcccttctcttaaaaataataacttattgccagatttggggcatttggaaagaagttcattgaagataaagcaaaagtaaaaaaaaaaaaaaaaaaaacaaggggaaagggttggttaggcaatcattctagggcagaaagaagtacaggataggaagagcataatacactgtttttctcaacaaggagcagtatgtacacagtcataatgatgtgactgcttagcccctaaatatggtaactactctgggacaatatgggaggaaaagtgaagattgtgatggtgtaagagctaatcctcatctgtcatatccagaaatcactatataatatataataatgaaatgactaagttatgtgaggaaaaaaacagaagacattgctaaaagagttaaaagtcattgctctggagaattaggagggatggggcaggggactgttaggatgcattataaactgaaaagcctttttaaaattttatgtattaatatatgcattcacttgaaaaactaaaaaaaaacaataatttggaaaaacccatgaaggtaactaacggaaggaaaaactaagagaatgaaaagtatttgcctctggaaagaacaactggcaggactgttgttttcattgtaagacttttggagccatttaattgtacttaaccattttcatctatttctttaataagaacaattccatcttaataaagagttacacttgttaata

SEQ ID NO: 412 - DNA, 2914 bp, Homo sapiens
  modified_base (28)..(29): a, c, g, t, unknown, or other
  modified_base (771)..(771): a, c, g, t, unknown, or other
  modified_base (2072)..(2072): a, c, g, t, unknown, or other
  modified_base (2200)..(2200): a, c, g, t, unknown, or other
  modified_base (2708)..(2709): a, c, g, t, unknown, or other
  modified_base (2712)..(2712): a, c, g, t, unknown, or other
  modified_base (2714)..(2715): a, c, g, t, unknown, or other
  modified_base (2727)..(2736): a, c, g, t, unknown, or other
  modified_base (2874)..(2874): a, c, g, t, unknown, or other
gctgcggcccgaggacgcgacgcgagcnnagttccggcgaggaggccgcgccagtgacagcgatggcggcggagtcggcgctccaagttgtggagaagctgcaggcgcgcctggccgcgaacccggaccctaagaagctattgaaatatttgaagaaactctccaccctgcctattacagtagacattcttgcggagactggggttgggaaaacagtaaatagcttgcgaaaacacgagcatgttggaagctttgccagggacctagtggcccagtggaagaagctggttcctgtggaacgaaatgctgagcctgatgaacaggactttgagaagagcaattcccgaaagcgccctcgggatgccctgcagaaggaggaggagatggagggggactaccaagaaacctggaaagccacggggagccgatcctatagccctgaccacaggcagaagaaacataggaaactctcggagctcgagagacctcacaaagtgtctcacggtcatgagaggagagatgagagaaagaggtgtcacagaatgtcaccaacttactcttcagaccctgagtcttctgattatggccatgttcaatcccctccatcttgtaccagtcctcatcagatgtacgtcgaccactacagatccctggaggaggaccaggagcccattgtttcacaccagaagcctgggaaaggccacagcaatgcctttcaggacagactcggggccagccaagaacgacacctgggtgaaccccatgggaaanggggttgtgagtcaaaacaaggagcacaaatcttcccacaaggacaaacgccccgtggatgccaagagtgatgagaaggcctctgtggtgagcagagagaaatcacacaaggccctctccaaagaggagaaccgaaggccaccctcaggggacaatgcaagggagaaaccgccctctagtggcgtaaagaaagagaaggacagagagggcagcagcctgaagaagaagtgtttgcctccctcagaggccgcttcagacaaccacctgaaaaagccaaagcacagagacccagagaaagccaaattggacaaaagcaagcaaggtctggacagctttgacacaggaaaaggagcaggagacctgttgcccaaggtaaaagagaagggttctaacaacctaaagactccagaagggaaagtcaaaactaatttggatagaaagtcactgggctccctccctaaagttgaggagacagatatggaggatgaattcgagcagccaaccatgtcttttgaatcctacctcagctatgaccagccccggaagaaaaagaaaaagattgtgaaaacttcagccacggcacttggagataaaggacttaaaaaaaatgactctaaaagcactggtaaaaacttggactcagttcagaaattacccaaggtgaacaaaaccaagtcagagaagccggctggagctgatttagccaagctgagaaaggtgcctgatgtgttgccagtgttgccagacctcccgttacccgcgatacaggccaattaccgtccactgccttccctcgagctgatatcctccttccagccaaagcgaaaagcgttctcttcaccccaggaagaagaagaagctggatttactgggcgcagaatgaattccaagatgcaggtgtattctggttccaagtgtgcctatctccctaaaatgatgaccttgcaccagcaatgcatccgagtacttaaaaacaacatcgattcaatctttgaagtgggaggagtcccatactctgttcttgaacccgttttggagaggtgtacacctgatcagctgtatcgcatagaggaatacaatcatgtattaattgaagaaacagatcaattatggaaagttcattgtcaccgagactttaaggaagaaagacccgaagagtatgagtcgtggcgagagatgtacctgcggcttcaggacgcccgagagcagcggctacgagtactaacaaagaatatccagttcgcacatgccaataagcccaaaggccgacaagcaaagatggcctttgtcaactctgtggnccaagccacctcgtgacgtccggaggaggcaggaaaagtttggaacgggaggagcagctgtccctgagaaaatcaagatcaagccagccccgtaccccatgggaagcagccatgcttccgccagtagnatcagctttaaccccagccctgaggagccggcctatgatggcccaagcaccagcagtgcccacttggcaccagtggtcagcagcactgtttcctatgatcctaggaaacccactgtgaagaaaattgccccaatgatggccaagacaattaaagctttcaagaacagattctcccgacgataaactgaggacttgccttggaaatggaatctggggaggcaggaatacaaggacagtgggggttggggaatggaattctacaggagactggagtcttgctttgtggatccttttggtctccgagtcctgcagtctgcaggtgctgcccctgggaacctgcgtgccacagccccgcctccctgcctggagcacactttagaattctgaagatgtgaagcctctgtctcactgaggattttaaaggtcaattatacttttgttgttcattagcatctttgtaaactataagacgtagttttaattaataaatattgcccccagattgtanntanannaaaaaaaaaaannnnnnnnnntttttgtcctctaccacacatttagccttttatcttccaggtccttattaaaatcagatgaaagcctagtgaaagccagtcttctgccccagctcagctctgtgtggactctggtccagacagaggactgggcatctncagacctgcacagtacctgctgacgtagggcaaggaatga

SEQ ID NO: 413 - DNA, 1276 bp, Homo sapiens
ctccctggttccgcgttctggttccgccatggaatccaacaaggatgaagctgagcgctgtatcagcatcgccctcaaggccatccagagcaaccagcccgaccgggcgctccgcttcctggagaaggcacagcggctgtatccgacgccgcgagttcgcgccctgattgagtccctcaaccagaaaccacagactgccggtgaccaacccccacccacagacacaacccatgcctcccacaggaaagcaggtgggaccgatgccccctcggccaacggtgaagctggaggagagagcaccaaaggctacactgcagaacaggttgcagctgtgaaaagggtcaagcaatgtaaagattactatgagatcctgggggtgagcagaggggcctcggatgaggacctgaagaaggcctaccgcagactggccctcaaattccacccagacaagaaccacgcacctggtgccactgaagccttcaaagccattggcacagcatatgcggtactcagcaacccggagaagaggaagcagtatgaccagttcggcgatgacaagagccaggcggcccggcacggccatgggcatggggatttccaccgtggctttgaggccgacatctcccctgaagacctcttcaacatgttctttggcggcggctccccttctagtaacgtccacgtctacagcaacggccgcatgcgctatacctaccagcaaaggcaggaccgcagggacaaccagggtgatggcgggctaggggtgtttgtgcagctgatgcctatcctcatcctgattctcgtgtcagctctcagccagctcatggtctccagtccaccctacagtctgagtccaagaccgtccgtgggccacatccacaggcgagtcactgaccacctgggtgtcgtctactatgtgggagacactttctccgaagagtacacaggctccagcctcaaaacagtcgagcggaatgtggaagatgattatatcgccaacctccggaacaactgctggaaggagaagcagcagaaggaaggcttgctgtaccgggcacgctactttggcgacacagatatgtaccacagagcacagaagatgggcacccccagctgcagccgactgtcagaggtgcaggcctccctgcatggatagtcctgggccagccacaccaccgaggtccaaactatgaaatccctggagaatttttggtgacatgcactgagccaaggtgatggactgtatatttgaggaaagacaaacaaagaaacaaaa

SEQ ID NO: 414 - DNA, 5875 bp, Homo sapiens
  modified_base (988)..(988): a, c, g, t, unknown, or other
  modified_base (990)..(991): a, c, g, t, unknown, or other
  modified_base (995)..(995): a, c, g, t, unknown, or other
  modified_base (997)..(1000): a, c, g, t, unknown, or other
  modified_base (1003)..(1011): a, c, g, t, unknown, or other
  modified_base (1066)..(1066): a, c, g, t, unknown, or other
  modified_base (1321)..(1321): a, c, g, t, unknown, or other
  modified_base (1335)..(1335): a, c, g, t, unknown, or other
  modified_base (3534)..(3534): a, c, g, t, unknown, or other
  modified_base (3990)..(3990): a, c, g, t, unknown, or other
  modified_base (4407)..(4407): a, c, g, t, unknown, or other
  modified_base (4674)..(4674): a, c, g, t, unknown, or other
  modified_base (4790)..(4790): a, c, g, t, unknown, or other
  modified_base (4858)..(4858): a, c, g, t, unknown, or other
  modified_base (4975)..(4975): a, c, g, t, unknown, or other
  modified_base (5250)..(5250): a, c, g, t, unknown, or other
  modified_base (5253)..(5253): a, c, g, t, unknown, or other
  modified_base (5255)..(5257): a, c, g, t, unknown, or other
  modified_base (5259)..(5259): a, c, g, t, unknown, or other
  modified_base (5262)..(5262): a, c, g, t, unknown, or other
  modified_base (5689)..(5689): a, c, g, t, unknown, or other
ggacaggcgtggcggccggagccccagcatccctgcttgaggtccaggagcggagcccgcggccaccgccgcctgatcagcgcgaccccggcccgcgcccgccccgcccggcaagatgctgcccgtgtaccaggaggtgaagcccaacccgctgcaggacgcgaacatctgctcacgcgtgttcttctggtggctcaatcccttgtttaaaattggccataaacggagattagaggaagatgatatgtattcagtgctgccagaagaccgctcacagcaccttggagaggagttgcaagggttctgggataaagaagttttaagagctgagaatgacgcacagaagccttctttaacaagagcaatcataaagtgttactggaaatcttatttagttttgggaatttttacgttaattgaggaaagtgccaaagtaatccagcccatatttttgggaaaaattattaattattttgaaaattatgatcccatggattctgtggctttgaacacagcgtacgcctatgccacggtgctgactttttgcacgctcattttggctatactgcatcacttatatttttatcacgttcagtgtgctgggatgaggttacgagtagccatgtgccatatgatttatcggaaggcacttcgtcttagtaacatggccatggggaagacaaccacaggccagatagtcaatctgctgtccaatgatgtgaacaagtttgatcaggtgacagtgttcttacacttcctgtgggcaggaccactgcaggcgatcgcagtgactgccctactctggatggagataggaatatcgtgccttgctgggatggcagttctaatcattctcctgcccttgcaaagctgttttgggaagttgttctcatcactgaggagtaaaactgcaactttcacggatgccaggatcaggaccatgaatgaagttataactggtataaggataataaaaatgtacgcctgngnnaagncnnnntcnnnnnnnnntaccaatttgagaaagaaggagatttccaagattctgagaagttcctgcctcagngggatgaatttggcttcgtttttcagtgcaagcaaaatcatcgtgtttgtgaccttcaccacctacgtgctcctcggcagtgtgatcacagccagccgcgtgttcgtggcagtgacgctgtatggggctgtgcggctgacggttaccctcttcttcccctcagccattgagagggtgtcagaggcaatcgtcagcatccgaagaatccagacctttttgctacttgatgagatatcacagcgcaaccgtcagctngccgtcagatggtnaaaaagatggtgcatgtgcaggattttactgctttttgggataaggcatcagagaccccaactctacaaggcctttcctttactgtcagacctggcgaattgttagctgtggtcggccccgtgggagcagggaagtcatcactgttaagtgccgtgctcggggaattggccccaagtcacgggctggtcagcgtgcatggaagaattgcctatgtgtctcagcagccctgggtgttctcgggaactctgaggagtaatattttatttgggaagaaatatgaaaaggaacgatatgaaaaagtcataaaggcttgtgctctgaaaaaggatttacagctgttggaggatggtgatctgactgtgataggagatcggggaaccacgctgagtggagggcagaaagcacgggtaaaccttgcaagagcagtgtatcaagatgctgacatctatctcctggacgatcctctcagtgcagtagatgcggaagttagcagacacttgttcgaactgtgtatttgtcaaattttgcatgagaagatcacaattttagtgactcatcagttgcagtacctcaaagctgcaagtcagattctgatattgaaagatggtaaaatggtgcagaaggggacttacactgagttcctaaaatctggtatagattttggctcccttttaaagaaggataatgaggaaagtgaacaacctccagttccaggaactcccacactaaggaatcgtaccttctcagagtcttcggtttggtctcaacaatcttctagaccctccttgaaagatggtgctctggagagccaagatacagagaatgtcccagttacactatcagaggagaaccgttctgaaggaaaagttggttttcaggcctataagaattacttcagagctggtgctcactggattgtcttcattttccttattctcctaaacactgcagctcaggttgcctatgtgcttcaagattggtggctttcatactgggcaaacaaacaaagtatgctaaatgtcactgtaaatggaggaggaaatgtaaccgagaagctagatcttaactggtacttaggaatttattcaggtttaactgtagctaccgttctttttggcatagcaagatctctattggtattctacgtccttgttaactcttcacaaactttgcacaacaaaatgtttgagtcaattctgaaagctccggtattattctttgatagaaatccaataggaagaattttaaatcgtttctccaaagacattggacacttggatgatttgctgccgctgacgtttttagatttcatccagacattgctacaagtggttggtgtggtctctgtggctgtggccgtgattccttggatcgcaatacccttggttccccttggaatcattttcatttttcttcggcgatattttttggaaacgtcaagagatgtgaagcgcctggaatctacaactcggagtccagtgttttcccacttgtcatcttctctccaggggctctggaccatccgggcatacaaagcagaagagaggtgtcaggaactgtttgatgcacaccaggatttacattcagaggcttggttcttgtttttgacaacgtcccgctggttcgccgtccgtctggatgccatctgtgccatgtttgtcatcatcgttgcctttgggtccctgattctggcaaaaactctggatgccgggcaggttggtttggcactgtcctatgccctcacgctcatggggatgtttcagtggtgtgttcgacaaagtgctgaagttgagaatatgatgatctcagtagaaagggtcattgaatacacagaccttgaaaaagaagcaccttgggaatatcagaaacgcccaccaccagcctggccccatgaaggagtgataatctttgacaatgtgaacttcatgtacagtccaggtgggcctctggtactgaagcatctgacagcactcattaaatcacaagaaaaggttggcattgtgggaagaaccggagctggaaaaagttccctcatctcagccctttttagattgtcagaacccgaaggtaaaatttggattgataagatcttgacaactgaaattggacttcacgatttaaggaagaaaatgtcaatcatacctcaggaacctgttttgttcactggaacaatgaggaaaaacctggatccctttaangagcacacggatgaggaactgtggaatgccttacaagaggtacaacttaaagaaaccattgaagatcttcctggtaaaatggatactgaattagcagaatcaggatccaattttagtgttggacaaagacaactggtgtgccttgccagggcaattctcaggaaaaatcagatattgattattgatgaagcgacggcaaatgtggatccaagaactgatgagttaatacaaaaaaaaatccgggagaaatttgcccactgcaccgtgctaaccattgcacacagattgaacaccattattgacagcgacaagataatggttttagattcaggaagactgaaagaatatgatgagccgtatgttttgctgcaaaataaagagagcctattttacaagatggtgcaacaactgggcaaggcagaagccgctgccctcactgaaacagcaaaacaggtnatacttcaaaagaaattatccacatattggtcacactgaccacatggttacaaacacttccaatggacagccctcgaccttaactattttcgagacagcactgtgaatccaaccaaaatgtcaagtccgttccgaaggcattttccactagtttttggactatgtaaaccacattgtacttttttttactttggcaacaaatatttatacatacaagatgctagttcatttgaatatttctcccaacttatccaaggatctccagctctaacaaaatggtttatttttatttaaatgtcaatagttgttttttaaaatccaaatcagaggtgcaggccaccagttaaatgccgtctatcaggttttgtgccttaagagactacagagtcaaagctcatttttaaaggagtaggacanagttgtcacaggtttttgttgttgtttttattgcccccaaaattacatgttaatttccatttatatcagggattctatttacttgaagactgtgaagttgccattttgtctcattgttttctttgacataactaggatccattatttcccctgaaggcttcttgttagaaaatagtacagttacaaccaataggaacaacaaaaagaaaaagtttgtgacattgtagtagggagtgtgtaccccttactccccatcaaaaaaaaaantggatacatggttaaaggatagaagggcaatattttatcatatgttctaaaagagaaggaagagaaaatactactttctcaaaatggaagcccttaaaggtgctttgatactgaangacacaaatgtgaccgtccatcctcctttagagttgcatgacttggacacggtaactgttgcagtttnagactcagcattgtgacacttcccaagaaggccaaacctctaaccgacattcctgaaatacgtggcattattcttttttggatttctcatttatggaaggctaaccctctgttgacngtaagccttttggtttgggctgtattgaaatcctttctaaattgcatgaataggctctgctaacgtgatgagacaaactgaaaattattgcaagcattgactataattatgcagtacgttctcaggatgcatccaggggttcattttcatgagcctgtccaggttagtttactcctgaccactaatagcattgtcatttgggctttctgttgaatgaatcaacaaaccacaatacttcctgggaccttttgtactttatttgaactatgagtctntantnnntnctngatgatggtggctgtaatatgttgagttcagtttactaaaggttttactattatggtttgaagtggagtctcatgacctctcagaataaggtgtcacctccctgaaattgcatatatgtatatagacatgcacacgtgtgcatttgtttgtatacatatatttgtccttcgtatagcaagttttttgctcatcagcagagagcaacagatgttttattgagtgaagccttaaaaagcacacaccacacacagctaactgccaaaatacattgaccgtagtagctgttcaactcctagtacttagaaatacacgtatggttaatgttcagtccaacaaaccacacacagtaaatgtttattaatagtcatggttcgtattttaggtgactgaaattgcaacagtgatcataatgaggtttgttaaaangatagctatattcaaaatgtctatatgtttatttggacttttgaggttaaagacagtcatataaacgtcctgtttctgttttaatgttatcatagaattttttaatgaaactaaattcaattgaaataaatgatagttttcatctccaaaaaaaaaaaaaaaaaaaaaaaaaaaaaaaaaaaaaaa

SEQ ID NO: 415 - DNA, 1562 bp, Homo sapiens
ctggaattcggggcgccgagcaggagcagggaacaaaggagcggagaggggaggggagagagttgggcgagggagagcccccggccggctgccagaagatcctggcgggaggaagcccaagtgtcacttgaattccacccaaggagcgggcgcctgggatcagagcgtcctgtttagcaataacggctggagcacgtcctacaagttacgggagagtcggctgtgaaggagacgttcgcttatcccctgtgtccccgctcctggcccctccagacccccgccttgcctcgcgctgggaggggagatccagaatgaaaggcaagaaaggtattgttgcagcatctggcagtgagactgaggatgaggacagcatggacattcccttggacctttcttcatccgctggctcaggcaagagaaggagaaggggcaacctacccaaggagtctgtgcagattcttcgggattggctgtatgagcaccgttacaatgcctatccttcagagcaagaaaaagcgttgctgtcccagcaaacacacctgtctacgctacaggtctgtaactggttcatcaacgcccgccgcaggctcctccctgacatgctgagaaaggatggcaaagatccaaatcagttcacaatttcccgccgtggggccaagatttctgaaacgagctctgtggagtccgtgatgggcatcaaaaacttcatgccagctctagaggagaccccatttcattcctgtacagctgggccaaacccaaccctagggaggccactgtctcctaagccgtcatccccgggatcagttttggctcgtccatcagtgatctgccataccactgtgactgcattgaaagatgtccctttctctctctgccagtcggtcggtgtgggacaaaacacagatatacagcagatagcggccaaaaacttcacagacacctctctcatgtacccagaggacacttgtaaatctggaccaagtacgaatacacagagtggtcttttcaacactcctccccctactccaccggacctcaaccaggacttcagtggatttcagcttctagtggatgttgcactcaaacgggctgcagagatggagcttcaggcaaaacttacagcttaacccattttcaagcaaaacagttctcagaaatgtcatgattgccggggtgaaggcaagagatgaattgcattattttatatattttttattaatatttgcacatgggattgctaaaacagcttcctgttactgagatgtcttcaatggaatacagtcattccaagaactataaacttaaagctactgtagaaacaaagggttttcttttttaaatgtttcttggtagattattcataatgtgagatggttcccaatatcatgtgatttttttttttcctccccttccctttttttgttattttttcagactgtgcaatacttagagaacctatagcatcttctcattcccatgtggaacaggatgcccacatactgtctaattaataaattttccattttttttcaaacaagtaaaaaaaaaaaaaaaaaaaa

SEQ ID NO: 416 - DNA, 2648 bp, Homo sapiens
gtgacagaagctgtgggaggagctggaggcttcaccgtggtaatcacagcgccgctgctgccccgccttgcaggtctcaggactgtcatcgcctctgggtgtgagggtactttggccaccgtccccggaaataaccgcgcctgcctctcaagataccccatcctctccacgccgctgccgctgccgccatgcaaggggaggacgccagatacctcaaaaggaaagttaaaggagggaatatagatgtacatccatcagaaaaagcactcattgttcactatgaagtggaagctaccattcttggagaaatgggggaccccatgttgggagaacgaaaagaatgtcaaaaaatcattcgacttaagagtctcaatgccaacacagatataacttccctggcaaggaaggtggttgaagaatgtaaactcattcatccttcaaaactaaatgaggtagaactgctgttgtactatctacagaaccgccgtgattcattgtcaggaaaagagaaaaaagaaaaatcaagcaagcctaaagatccacctccttttgaaggaatggagattgatgaagttgctaacattaatgacatggatgaatatattgagttattatatgaagatattcctgacaaagttcggggttctgctttgatcctgcagcttgctcgaaatcctgataacttggaagaactactattgaatgaaactgcccttggtgcattagcaagggtcctgagagaagactggaagcaaagtgtcgagttagctacaaacataatttacatctttttttgtttctccagcttttctcaatttcatggacttattactcactataaaattggagctctgtgtatgaatattattgatcatgagttaaaaagacatgagctttggcaagaagaactctcaaagaagaagaaagctgttgatgaagaccctgaaaaccaaaccttgagaaaggattatgaaaaaacctttaaaaagtaccaggggcttgtggtaaaacaggaacagctattacgagttgctctttatttgcttctgaatcttgctgaggatactcgtaccgaactgaaaatgaggaacaagaacatagttcacatgttggtgaaagcccttgatcgggacaattttgagctgctaattttagttgtgtcattcttgaagaaactcagcatttttatggagaataaaaatgatatggtggaaatggatattgttgaaaaactggtgaaaatgataccttgtgagcatgaagacctgctgaatatcaccctccgacttttactaaacctatcctttgacacaggactgaggaataagatggtacaagttggactgcttcccaagctcactgcactcctaggcaatgacaactacaaacaaatagcaatgtgtgttctttaccacataagcatggatgaccgctttaaatcaatgtttgcatacactgactgtataccacagttaatgaagatgctgtttgaatgttcagatgaacgaattgacttggaactcatttctttctgcattaatcttgctgctaacaaaagaaatgtacagcttatctgtgaaggaaatgggctgaagatgctcatgaagagggctctgaagtttaaggatccattgctgatgaaaatgattagaaacatttctcagcatgatggaccaactaaaaatctgtttattgattatgttggggaccttgcagcccagatctctaatgatgaagaagaggagttcgtgattgaatgtttgggaactcttgcaaacttgaccattccagacttagactgggaattggttcttaaagaatataagttggttccatacctcaaggataaactaaaaccaggtgctgcagaagatgatcttgttttagaagtggttataatgattggaactgtatccatggatgactcttgtgctgcattgctagccaaatctggcataatccctgcactcattgaattgctaaatgctcaacaagaagatgatgaatttgtgtgtcagataatttatgtcttctaccagatggttttccaccaagccacaagagacgtcataatcaaggaaacacaggctccagcatatctcatagacctaatgcatgataagaataatgaaatccgaaaggtctgtgataatacattagatattatagcggaatatgatgaagaatgggctaagaaaattcagagtgaaaagtttcgctggcataactctcagtggctggagatggtagagagtcgtcagatggatgagagtgagcagtacttgtatggtgatgatcgaattgagccatacattcatgaaggagatattctcgaaagacctgaccttttctacaactcagatggattaattgcctctgaaggagccataagtcccgatttcttcaatgattaccaccttcaaaatggagatgttgttgggcagcattcatttcctggcagccttggaatggatggctttggccaaccagttggcattcttggacgccctgccacagcatatggattccgccctgatgaaccttactactatggctatggatcttgataaagtatctgtttccatgtgtaatctcagcttagaagaaatctgtgtgggttgggttaattttggatctttgcctaataa

SEQ ID NO: 417 - DNA, 704 bp, Homo sapiens
gggcggccacctgtctttgccgcggtgacccttctctcatgaccctgcggtgccttgagccctccgggaatggcggggaagggacgcggagccagtgggggaccgcggggtcggcggaggagccatccccgcaggcggcgcgtctggcgaaggccctgcgggagctcggtcagacaggatggtactggggaagtatgactgttaatgaagccaaagagaaattaaaagaggcaccagaaggaactttcttgattagagatagctcgcattcagactacctactaacaatatctgttaaaacatcagctggaccaactaatcttcgaatcgaataccaagacggaaaattcagattggactctatcatatgtgtcaaatccaagcttaaacaatttgacagtgtggttcatctgatcgactactatgttcagatgtgcaaggataagcggacaggtccagaagccccccggaacggcactgttcacctttatctgaccaaaccgctctacacgtcagcaccatctctgcagcatctctgtaggctcaccattaacaaatgtaccggtgccatctggggactgcctttaccaacaagactaaaagattacttggaagaatataaattccaggtataaatgtttctctttttttaaacatgtctcacatagagtatctccgaatgcagctatgtaaaagagaaccaa

SEQ ID NO: 418 - DNA, 1280 bp, Homo sapiens
tgccgcagcccccgcccgcccgcagagcttttgaaaggcggcgggaggcggcgagcgccatggccagtccgggctgcctgctgtgcgtgctgggcctgctactctgcggggcggcgagcctcgagctgtctagaccccacggcgacaccgccaagaagcccatcatcggaatattaatgcaaaaatgccgtaataaagtcatgaaaaactatggaagatactatattgctgcgtcctatgtaaagtacttggagtctgcaggtgcgagagttgtaccagtaaggctggatcttacagagaaagactatgaaatacttttcaaatctattaatggaatccttttccctggaggaagtgttgacctcagacgctcagattatgctaaagtggccaaaatattttataacttgtccatacagagttttgatgatggagactattttcctgtgtggggcacatgccttggatttgaagagctttcactgctgattagtggagagtgcttattaactgccacagatactgttgacgtggcaatgccgctgaacttcactggaggtcaattgcacagcagaatgttccagaattttcctactgagttgttgctgtcattagcagtagaacctctgactgccaatttccataagtggagcctctccgtgaagaattttacaatgaatgaaaagttaaagaagtttttcaatgtcttaactacaaatacagatggcaagattgagtttatttcaacaatggaaggatataagtatccagtatatggtgtccagtggcatccagagaaagcaccttatgagtggaagaatttggatggcatttcccatgcacctaatgctgtgaaaaccgcattttatttagcagagttttttgttaatgaagctcggaaaaacaaccatcattttaaatctgaatctgaagaggagaaagcattgatttatcagttcagtccaatttatactggaaatatttcttcatttcagcaatgttacatatttgattgaaagtcttcaatttgttaacagagcaaatttgaataattccatgattaaactgttagaataacttgctactcatggcaagattaggaagtcacagattcttttctataatgtgcctggctctgattcttcattatgtatgtgactatttatataacattagataattaaatagtgagacataaatagagtgctttttcatggaaaagccttcttatatctgaagattgaaaaataaatttactgaaatacaaaaaaaaaaaaaaa

SEQ ID NO: 419 - DNA, 577 bp, Homo sapiens
cgcgcttaagtaactagtccgtagttcgagggtgcgccgtgtccttttgcgttggtaccagcggcgacatgacggggtacactccggatgagaaactgcggctgcagcagctgcgagagctgagaaggcgatggctgaaggaccaggagctgagccctcgggagccggtgctgcccccacagaagatggggcctatggagaaattctggaataaatttttggagaataaatccccttggaggaaaatggtccatggggtatacaaaaagagtatctttgttttcactcatgtacttgtacctgtctggattattcattattacatgaagtatcatgtttctgaaaaaccatatggcatagttgaaaagaagtccagaatattccctggtgatacaattctggagactggagaagtaattccaccaatgaaagaatttcctgatcaacatcattaaagattatgtaaaaagttaaaaggcttatgagcctaagtttgttcctatattaccatatttactgaattttctggaaaagtaactttaataaagtttaatctcagaaattgtcaaaaaaaaaa

SEQ ID NO: 420 - DNA, 897 bp, Homo sapiens
agagactgcgagaaggaggtcccccacggcccttcaggatgaaagctgcggtgctgaccttggccgtgctcttcctgacggggagccaggctcggcatttctggcagcaagatgaacccccccagagcccctgggatcgagtgaaggacctggccactgtgtacgtggatgtgctcaaagacagcggcagagactatgtgtcccagtttgaaggctccgccttgggaaaacagctaaacctaaagctccttgacaactgggacagcgtgacctccaccttcagcaagctgcgcgaacagctcggccctgtgacccaggagttctgggataacctggaaaaggagacagagggcctgaggcaggagatgagcaaggatctggaggaggtgaaggccaaggtgcagccctacctggacgacttccagaagaagtggcaggaggagatggagctctaccgccagaaggtggagccgctgcgcgcagagctccaagagggcgcgcgccagaagctgcacgagctgcaagagaagctgagcccactgggcgaggagatgcgcgaccgcgcgcgcgcccatgtggacgcgctgcgcacgcatctggccccctacagcgacgagctgcgccagcgcttggccgcgcgccttgaggctctcaaggagaacggcggcgccagactggccgagtaccacgccaaggccaccgagcatctgagcacgctcagcgagaaggccaagcccgcgctcgaggacctccgccaaggcctgctgcccgtgctggagagcttcaaggtcagcttcctgagcgctctcgaggagtacactaagaagctcaacacccagtgaggcgcccgccgccgccccccttcccggtgctcagaataaacgtttccaaagtggg

SEQ ID NO: 421 - DNA, 4617 bp, Homo sapiens
atccgataggaccaggtagccactgagcatgcctgtctggtgggcatagcctctgtgcctggtggggtccagccctgtatgtggacttcctgggggaccgcctgcatgctgggaaagtcctgcaactgtgggctctgggccggacccctcctccttggggagcgttgctgtggtctccgcagcctgttggtgtggtccgagaggggactggtgtgtggtggtagggacgcaggtgctcaggagggctcctcaggctgcctctctgcctgttactgctgctccctccctggtcctggggactcgctcaggcctggatgtgtggttttggacaccttggaaagaggttagctgtgagttttgctttgattgggctttgagctgctgagctagatctgtccaagcatgcttttgtggttttctcgagtctttggtcaccctgcgtagaattacctttacttttgccttcattttaggtaatcattaccaaatgaggaggaaaggacgatgtcatcgaggctctgcagcgaggcatccttcttccccatgcagtgttaaacactcccctacgcgagaaacgctgacctacgctcaagctcaaaggatggtagagatagaaattgaagggcgcttgcacaggatcagtatttttgatcccctggagatcatattggaagatgacctcactgctcaagagatgagtgagtgcaacagcaacaaggaaaacagcgagcggcctcctgtctgcttaagaactaagcgtcacaaaaacaacagagtcaaaaagaaaaacgaggccctccccagcgcccacggcacgccggcctcggccagtgccctcccggagcccaaggtgcgcatcgtggagtacagccctccgtccgcccccaggaggcctcctgtgtactacaagttcatcgagaagtcggccgaggaactggacaacgaggtggagtatgacatggacgaggaggactatgcctggctggagatcgtcaatgagaagcgcaagggcgactgcgtccccgccgtgtcgcagagcatgtttgagttcctgatggaccgcttcgagaaggagtcgcactgcgagaaccagaagcagggcgagcagcagtctctgatcgacgaggacgccgtgtgctgcatctgcatggacggggagtgtcagaacagcaacgtgatcctcttctgcgacatgtgcaacctggccgtgcaccaggagtgctacggggtgccctacatccccgagggccagtggctctgccgccactgcctgcagtcgcgggcccggcccgccgactgtgtgctgtgccccaacaagggtggtgccttcaaaaagacagatgacgaccgctggggtcacgtggtgtgtgccctgtggatcccagaggtcggctttgccaacacggtgttcatcgagcccatcgatggggtgaggaacatccctccagcccggtggaaactgacatgctacctctgtaagcagaagggcgtgggtgcctgcatccagtgccacaaagcaaactgctacacagcattccatgtgacgtgtgcccagaaggctggcctgtacatgaaaatggagcccgtgaaggaactgactggcggtggcaccaccttctccgtcagaaagaccgcttactgtgatgtccacacgcctccaggctgcacccggaggcctctgaatatttacggggatgtcgaaatgaaaaatggcgtctgtcgaaaagagagctcggttaaaacggtcaggtccacatccaaggtcaggaagaaggcaaaaaaggctaagaaagctctggctgagccctgcgcggtcctgccgaccgtgtgcgctccttatattcccccgcagaggttaaataggattgcgaatcaggtggccattcagcggaagaagcagtttgtggagcgagcccacagctactggctgctcaagcggctgtccaggaacggggcccccctgctgcggcggctgcagtccagcctgcagtctcagcgaagctcacagcagagagaaaatgatgaggagatgaaggctgccaaagagaagctgaagtactggcagcggctgcggcacgacctggagcgcgctcgcctgctgatcgagctgctgcgcaagcgggagaagctcaagcgtgagcaggtgaaggtggagcaggtcgccatggagctgcggctgaccccgctgacggtgctgctgcgctcagtgctggaccagctgcaagacaaggaccccgccaggatatttgcgcagcccgtgagtctgaaggaggtaccagattatttggatcacattaaacatcccatggactttgccacaatgaggaaacggttagaagctcaagggtataaaaacctccatgagtttgaggaggattttgatctcattatagataactgcatgaagtacaatgccagggacaccgtgttctatagagccgcggtgaggctgcgcgatcagggaggtgttgttctgaggcaggcccggcgcgaggtggacagcatcggcttggaagaggcctcggggatgcacctgcctgagcggcctgctgcggcaccgcggcggcctttctcctgggaagacgtggacaggttgctggaccccgccaacagagcccacctgggcctggaggagcagctgagagagctgctggacatgctcgacctcacctgcgctatgaagtccagcggctcccggagcaagcgggcaaagctgctcaaaaaggaaattgcccttctccgaaacaagctgagccagcagcacagccagcccctgcccacggggccaggcttggaaggcttcgaagaggacggagctgcgctggggccggaggcgggcgaggaagtccttccgaggttggagactcttctgcagccaaggaaaaggtcgcggagcacatgcggagactccgaggtggaggaggagtccccaggaaagcgcctggacgcaggtctcaccaacggctttgggggtgcgaggagcgagcaggagccgggcggcggcctggggaggaaggccacaccccgacgacgctgtgcctccgagtccagcatctcctccagcaacagcccgctctgcgactcgagctttaatgcgcccaaatgtgggcggggcaaaccggctcttgtgcgacggcacacgctggaggaccgcagtgagctgatctcctgcatcgagaatgggaactacgccaaggcggccaggatcgcagccgaagtcggccagagcagcatgtggatctccactgatgccgccgcctcggtgctggagcctctgaaggtggtgtgggccaagtgcagcggctacccctcctacccggcactgatcatcgaccccaagatgccccgtgtgcctggccaccacaacggcgtcaccatcccggccccacccctggacgtgctgaagattggggagcacatgcagaccaagtctgatgagaagctgttcctcgttctcttttttgataataagagaagttggcagtggcttcctaagtccaaaatggttccccttggtattgacgaaactatagacaagttaaagatgatggaagggaggaattccagcatccggaaggccgtgcggatcgcttttgaccgcgccatgaaccacctgagccgcgtccacggggagccgaccagcgacctcagtgacattgactgacggcccggccgccagcgcgggtcttgtccatagtgttgataagctgtacatgtttgtatattgttcaaaacttaacttattctgatttttagttatagctctttaattctttttccccggggaggggggaggttttatttccaagttttctaggaacccatctccgtctgggcgctgtgagtggggtgggcacgtccgggcagcccagtgcgtctgtcgcacgtccccaggccgtgctgctggcgtcactttctttgatatgtagctttttcttaaagacttttgaatgtttaataattttgtaaatcatgctctttacacagagtaccacttatttaataagacgggatgtaaatttacaatgacaaatgtgtattttaagaaagaaaatgacattattttgaatggtactttgtggaaagaggggagaataaagttatgctgtgtacatcacttgcagatcaccaaaaacactccgctgcccgtgaccgccggtgggtgtgtccccgctcccgtcgtcccgcccacctcaaaccccgcaggtgtgcctcccagcggattatttattgtagaaagtgtattcatttgctttataatgaaaaatacatttgcaaaggtatattgatatgcatttttatacaggcacataaaaattcaacttggcttgggagcagaatgcattgcattgtataaatgactctggcctgtgtgtactttgattttataacttgtaatcttttgtttacaatgaggggctttctgtaacttgttttaatttagaacactttggtagcaatagaaactttggatacatttttgtatggtacctgtgatgtatatagaattagtactttatttttatttttaagaggtaaagcattatgttggggaaagtagggtgggtttccaaatttgcattttttatattaaaaataaagtcaagaaaaaaaaaa

SEQ ID NO: 422 - DNA, 2707 bp, Homo sapiens; identical to SEQ ID NO: 334

SEQ ID NO: 423 - DNA, 3003 bp, Homo sapiens; identical to SEQ ID NO: 148

SEQ ID NO: 424 - DNA, 2215 bp, Homo sapiens
actcagtagaccgccactggctgtgcacgttatggggtttccacctagggctcggcctgaggcttgtaacactccgttttcccccgagtcacaggggcagtcttgcccctcgcagctgggtcgcggtgtctctcaaaggtccccctctacaggggcttcgtgaggcccgggcccacagggcgctcggtcccggaagtgacgtctcccagaggggccggaagtggcagtggagggagggaagatggcggaggtgggggagataatcgagggctgccgcctacccgtgctgcggcggaaccaggacaacgaagatgagtggcccctggccgagatcctgagcgtgaaggacatcagtggccggaagcttttctacgtccattacattgacttcaacaaacgtctggatgaatgggtgacgcatgagcggctggacctaaagaagatccagttccccaagaaagaggccaagacccccactaagaacggacttcctgggtcccgtcctggctctccagagagagaggtgccggcctcggcgcaggccagcgggaagaccttgccaatcccggtccagatcacactccgcttcaacctgcccaaggagcgggaggccattcccggtggcgagcctgaccagccgctctcctccagctcctgcctgcagcccaaccaccgctcaacgaaacggaaggtggaggtggtttcaccagcaactccagtgcccagcgagacagccccggcctcggtttttccccagaatggagccgcccgtagggcagtggcagcccagccaggacggaagcgaaaatcgaattgtttgggcactgatgaggactcccaggacagctctgatggaataccgtcagcaccacgcatgactggcagcctggtgtctgatcgaagccacgacgacatcgtcacccggatgaagaacattgagtgcattgagctgggccggcaccgcctcaagccgtggtacttctccccgtacccacaggaactcaccacattgcctgtcctctacctgtgcgagttctgcctcaagtacggccgtagtctcaagtgtcttcagcgtcatttgaccaagtgtgacctacgacatcctccaggcaatgagatttaccgcaagggcaccatctccttctttgagattgatggacgtaagaacaagagttattcccagaacctgtgtcttttggccaagtgtttccttgaccataagacactgtactatgacacagaccctttcctcttctacgtcatgacagagtatgactgtaagggcttccacatcgtgggctacttctccaaggagaaagaatcaacggaagactacaatgtggcctgcatcctaaccctgcctccctaccagcgccggggctaccggaagctgctgatcgagttcagctatgaactctccaaagtggaagggaaaacagggacccctgagaagcccctctcagaccttggcctcctatcctatcgaagctactggtcccagaccatcctggagatcctgatggggctgaagtcggagagcggggagaggccacagatcaccatcaatgagattagtgaaatcaccagcatcaagaaggaggatgtcatctccactctgcagtacctcaatctcatcaactactacaagggccagtacatcctcacactgtcagaggacatcgtggatggccatgagcgggccatgctcaagcggctcctgcggatcgactccaagtgtctgcacttcactcccaaggactggagcaagagggggaagtggtgaccagacactgcccactgcagtgccaagacggcagcaggactggggctgatagcccaccccgcccccactgcagctcccacaaagcactctaagggagatggggctgaggacagctcaaaaaggagaggacaggcctgcagggcccacttgcccagcaccaaggcgagctccgggctcagaccaactccaaggtcagctggccacagcccaggcctcctctgaagcagggaccagagggagccaggcagctgtgtacagtgagaagggatccggatgggggagctctgtacagagggctggtgattgtaaaaatttcttttgtaaagtagaagttgggggtggggtgggtgctggctgcaaaaatttctggcttctcttacccctattgcccccggcaataaattgtttctatatgccaaaaaaaaaaaaaaa

SEQ ID NO: 425 - DNA, 1977 bp, Homo sapiens
caaattattattgtctcttaggtttggatattgatgggatatacagagtaagtggcaacctcgcagtgatccagaaactaaggtttgcagtcaatcatggtaagattatatttactgttgttattcagatgcatcactcataactttttgaactggcttaaagtaattttttaaaatgtccaattcctgctgtttttcagatgagaaattggacttgaatgacagtaaatgggaagatattcatgtcattactggagccctcaaaatgttttttcgagaattaccagaacctctttttacatttaatcattttaatgattttgttaatgcaattaagcaagaaccaagacagcgagtcgctgctgttaaggacctaatcagacagttgccaaagccaaaccaagacacaatgcagattcttttccgacatctcagaagagttatagaaaatggagagaaaaatcgaatgacctatcagagtatagcaattgtttttggtcccactctattaaaaccagaaaaagagactggtaatatagcagttcatactgtgtaccagaatcagattgtagaattaattcttctggaactgagttccatcttcggacgttgattcttactgaagacaacctgtggaatagaagctggattccatcagatttcaaatgtttatacacaatgtattttattttttggaccaagcagtgactctttgattttgcactttttttttgagggatcagaagggaaggggagagtcgagatgtgtgttaggccctcatatttgctgctttgttgcaagttgatataactgcgtgtaattatgaattcattttatcctgaatgtttgcatttcatactctgaatttcagtaaaaatcaaaacttaaaattctaaccagtcatatacactggataatttggtaagaaaactgtattttttttccctgaaattggataatgtactttcttctcaagattcatgacttgatagaacaatactttcagttatgttgcaaaggctcttgggcattttaaacaaaatgaagtatatccattttgaaacctgtgtatttctttttcggggtttctgcatgcagtggcagtcttaagtgccaaaattcattataaccccaaaataaccccttgatgaaggcttgctgtcttttactgtgttacacagcatccttactggatatcttagttgcttgtttgggcagcacactaatattacttaaaacactgtgatatactggagttttagttagcggaagtcagttcagggcattttagggctgtcttgctatactgaattgtagctaacaatcctaattatatctagtaccatactgagttattggtatgaccctgtggaaacacacattattttatgtaaatataggctaaagacttaatgtcctttagcttgtgtatataattgtgttgtatagtctcagagtacattctaaccctacatttctaatcattgttattggtaatcttttctgtgaatattaggtttcctccagaaatagtccgttatttgggaaagttaactgtgtgcacttttagatattaactacatttacaggcaaatcactgtaatgagaatggtactggaaaaatactgaatagacttgctaaatggcacatgcactacaagaggaaccttttgggttatttaatatgtacagaaaacattagaaaaaatttattacagaattctaattccagtatgaatagtggaaacccatctgtaaattagatggatgttggatggaaaatgacattgctaaatttgagaatttctttttacctactaatgtagattgctttgtataataaaacacagggtttggaaggttttgttacagggagcatggtctgttgaagatttttaaaatgtatttttctagattaacttctgtacatgaaatgtctaataaaactctaagaggtttagagatttttccattgg

SEQ ID NO: 426 - DNA, 1488 bp, Homo sapiens
gccacgtcactggctcaggctcagctgctgggtcaccaggagaatggacccttcctccacctcagctcagagcacagtgatgattcgtgactttcccaatagaacttcaaatctctgaggacggggggtggggggatgtgcttgagtgtttgtactcatggtcttgttctcggagtgacaaagctggaacacaatacctctatgcatgaaaaggttgtcacttgtcacaactaacaggctttcacctcaaggaaattttcttcccttgtgtacttttcccctggcagtggacatggctgcactcttccaagaagcaagcagctgtcccgtctgctcagactatctggaaaaaccaatgtccctggagtgtggatgcaccgtctgcctcaagtgcatcaattcgctgcagaaggagccccatggggaggatctgctttgctgttgctgttccatggtctctcagaggaacaaaatcaggcccaatcggcagctagagaggctggtttcccacatcaaggaactggagcccaagctgaagaagattctacagatgaacccaaggatgcggaagttccaagtggatatgaccttggatgccgacacagccaacaacttcctcctcatttctgacgacctcaggagcgtccgaagtgggctcatcacacagaatcggcaagaccttgccgagagatttgacgtgtccgtttgcatcctgggctcccctcgctttacctgtggccgccactactgggaggtggacgtgggaacaagcacagaatgggacctgggagtctgcagagaatctgttcactgcaaagggaagatccagctgaccacagagcttggattctggactgtgagtttgagggatggaagccgcctctctgccagcacggtgccgctgactttcctcttagtagaccgcaagttacagcgagtggggatttttctggatatgggcatgcagaacgtttccttttttgatgctgaaagtggttcccatgtctatacattcaggagcgtctctgctgaggagccactgcgcccatttttggctccttcaattccacctaatggtgatcaaggtgtcttgagcatctgtcctttgatgaactcaggcactactgatgctccagtccgtcctggggaggccaaataagccgccactgcaaaaaaaaacagggtcagaaaattacttgggtgggtagacttaggaattttctacttggtaaaagcattatacagtcataggagaaagatatgggacatttctataatctatattctaatttgattcgattattgagtcgtaagtattaattattgccaccatccaactcattgagtcttatggttcacatcttgtttcctatagaaatgttctgtattctcggatcaatttccaaatgctttactttttcatttctgtaagttcaaatcaatgtttaaattatagaagttatgaggtaaataaacatttggatatca

SEQ ID NO: 427 - DNA, 5200 bp, Homo sapiens
gaagtcgacggcgccggcggctcctgcaggaggccactgtctgcagctcccgtgaagatgtccactccagacccacccctgggcggaactcctcggccaggtccttccccgggccctggcccttcccctggagccatgctgggccctagcccgggtccctcgccgggctccgcccacagcatgatggggcccagcccagggccgccctcagcaggacaccccatccccacccaggggcctggagggtaccctcaggacaacatgcaccagatgcacaagcccatggagtccatgcatgagaagggcatgtcggacgacccgcgctacaaccagatgaaaggaatggggatgcggtcagggggccatgctgggatggggcccccgcccagccccatggaccagcactcccaaggttacccctcgcccctgggtggctctgagcatgcctctagtccagttccagccagtggcccgtcttcggggccccagatgtcttccgggccaggaggtgccccgctggatggtgctgacccccaggccttggggcagcagaaccggggcccaaccccatttaaccagaaccagctgcaccagctcagagctcagatcatggcctacaagatgctggccagggggcagcccctccccgaccacctgcagatggcggtgcagggcaagcggccgatgcccgggatgcagcagcagatgccaacgctacctccaccctcggtgtccgcaacaggacccggccctggccctggccctggccccggcccgggtcccggcccggcacctccaaattacagcaggcctcatggtatgggagggcccaacatgcctcccccaggaccctcgggcgtgccccccgggatgccaggccagcctcctggagggcctcccaagccctggcctgaaggacccatggcgaatgctgctgcccccacgagcacccctcagaagctgattcccccgcagccaacgggccgcccttcccccgcgccccctgccgtcccacccgccgcctcgcccgtgatgccaccgcagacccagtcccccgggcagccggcccagcccgcgcccatggtgccactgcaccagaagcagagccgcatcacccccatccagaagccgcggggcctcgaccctgtggagatcctgcaggagcgcgagtacaggctgcaggctcgcatcgcacaccgaattcaggaacttgaaaaccttcccgggtccctggccggggatttgcgaaccaaagcgaccattgagctcaaggccctcaggctgctgaacttccagaggcagctgcgccaggaggtggtggtgtgcatgcggagggacacagcgctggagacagccctcaatgctaaggcctacaagcgcagcaagcgccagtccctgcgcgaggcccgcatcactgagaagctggagaagcagcagaagatcgagcaggagcgcaagcgccggcagaagcaccaggaatacctcaatagcattctccagcatgccaaggatttcaaggaatatcacagatccgtcacaggcaaaatccagaagctgaccaaggcagtggccacgtaccatgccaacacggagcgggagcagaagaaagagaacgagcggatcgagaaggagcgcatgcggaggctcatggctgaagatgaggaggggtaccgcaagctcatcgaccagaagaaggacaagcgcctggcctacctcttgcagcagacagacgagtacgtggctaacctcacggagctggtgccgcagcacaaggctgcccaggtcgccaaggagaaaaagaagaaaaagaaaaagaagaaggcagaaaatgcagaaggacagacgcctgccattgggccggatggcgagcctctagacgagaccagccagatgagcgacctcccggtgaaggtgatccacgtggagagtgggaagatcctcacaggcacagatgcccccaaagccgggcagctggaggcctggctcgagatgaacccggggtatgaagtagctccgaggtctgatagtgaagaaagtggctcagaagaagaggaagaggaggaggaggaagagcagccgcaggcagcacagcctcccaccctgcccgtggaggagaagaagaagattccagatccagacagcgatgacgtctctgaggtggacgcgcggcacatcattgagaatgccaagcaagatgtcgatgatgaatatggcgtgtcccaggcccttgcacgtggcctgcagtcctactatgccgtggcccatgctgtcactgagagagtggacaagcagtcagcgcttatggtcaatggtgtcctcaaacagtaccagatcaaaggtttggagtggctggtgtccctgtacaacaacaacctgaacggcatcctggccgacgagatgggcctggggaagaccatccagaccatcgcgctcatcacgtacctcatggagcacaaacgcatcaatgggcccttcctcatcatcgtgcctctctcaacgctgtccaactgggcgtacgagtttgacaagtgggccccctccgtggtgaaggtgtcttacaagggatccccagcagcaagacgggcctttgtcccccagctccggagtgggaagttcaacgtcttgctgacgacgtacgagtacatcatcaaagacaagcacatcctcgccaagatccgttggaagtacatgattgtggacgaaggtcaccgcatgaagaaccaccactgcaagctgacgcaggtgctcaacacgcactatgtggcaccccgccgcctgctgctgacgggcacaccgctgcagaacaagcttcccgagctctgggcgctgctcaacttcctgctgcccaccatcttcaagagctgcagcaccttcgagcagtggtttaacgcaccctttgccatgaccggggaaaaggtggacctgaatgaggaggaaaccattctcatcatccggcgtctccacaaagtgctgcggcccttcttgctccgacgactcaagaaggaagtcgaggcccagttgcccgaaaaggtggagtacgtcatcaagtgcgacatgtctgcgctgcagcgagtgctctaccgccacatgcaggccaagggcgtgctgctgactgatggctccgagaaggacaagaagggcaaaggcggcaccaagaccctgatgaacaccatcatgcagctgcggaagatctgcaaccacccctacatgttccagcacatcgaggagtccttttccgagcacttggggttcactggcggcattgtccaagggctggacctgtaccgagcctcgggtaaatttgagcttcttgatagaattcttcccaaactccgagcaaccaaccacaaagtgctgctgttctgccaaatgacctccctcatgaccatcatggaagattactttgcgtatcgcggctttaaatacctcaggcttgatggaaccacgaaggcggaggaccggggcatgctgctgaaaaccttcaacgagcccggctctgagtacttcatcttcctgctcagcacccgggctggggggctcggcctgaacctccagtcggcagacactgtgatcatttttgacagcgactggaatcctcaccaggacctgcaagcgcaggaccgagcccaccgcatcgggcagcagaacgaggtgcgtgtgctccgcctctgcaccgtcaacagcgtggaggagaagatcctagctgcagccaagtacaagctcaacgtggaccagaaggtgatccaggccggcatgttcgaccagaagtcctccagccatgagcggcgcgccttcctgcaggccatcctggagcacgaggagcaggatgagagcagacactgcagcacgggcagcggcagtgccagcttcgcccacactgcccctccgccagcgggcgtcaaccccgacttggaggagccacctctaaaggaggaagacgaggtgcccgacgacgagaccgtcaaccagatgatcgcccggcacgaggaggagtttgatctgttcatgcgcatggacctggaccgcaggcgcgaggaggcccgcaaccccaagcggaagccgcgcctcatggaggaggacgagctcccctcgtggatcatcaaggacgacgcggaggtggagcggctgacctgtgaggaggaggaggagaagatgttcggccgtggctcccgccaccgcaaggaggtggactacagcgactcactgacggagaagcagtggctcaaggccatcgaggagggcacgctggaggagatcgaagaggaggtccggcagaagaaatcatcacggaagcgcaagcgagacagcgacgccggctcctccaccccgaccaccagcacccgcagccgcgacaaggacgacgagagcaagaagcagaagaagcgcgggcggccgcctgccgagaaactctcccctaacccacccaacctcaccaagaagatgaagaagattgtggatgccgtgatcaagtacaaggacagcagcagtggacgtcagctcagcgaggtcttcatccagctgccctcgcgaaaggagctgcccgagtactacgagctcatccgcaagcccgtggacttcaagaagataaaggagcgcattcgcaaccacaagtaccgcagcctcaacgacctagagaaggacgtcatgctcctgtgccagaacgcacagaccttcaacctggagggctccctgatctatgaagactccatcgtcttgcagtcggtcttcaccagcgtgcggcagaaaatcgagaaggaggatgacagtgaaggcgaggagagtgaggaggaggaagagggcgaggaggaaggctccgaatccgaatctcggtccgtcaaagtgaagatcaagcttggccggaaggagaaggcacaggaccggctgaagggcggccggcggcggccgagccgagggtcccgagccaagccggtcgtgagtgacgatgacagtgaggaggaacaagaggaggaccgctcaggaagtggcagcgaagaagactgagccccgacattccagtctcgaccccgagcccctcgttccagagctgagatggcataggccttagcagtaacgggtagcagcagatgtagtttcagacttggagtaaaactgtataaacaaaagaatcttccatatttatacagcagagaagctgtaggactgtttgtgactggccctgtcctggcatcagtagcatctg

SEQ ID NO: 428 - DNA, 1851 bp, Homo sapiens
ggcacgaggcggagcagagacaggccctcggggtggaggtctttggtttcataagagcctgagagagatttttctaagatatgtgtaacacaccaacgtactgtgacctaggaaaggctgctaaggatgtcttcaacaaaggatatggctttggcatggtcaagatagacctgaaaaccaagtcttgtagtggagtgatggaattttctacttctggtcatgcttacactgatacagggaaagcatcaggcaacctagaaaccaaatataaggtctgtaactatggacttaccttcacccagaaatggaacacagacaatactctagggacagaaatctcttgggagaataagttggctgaagggttgaaactgactcttgataccatatttgtaccgaacacaggaaagaagagtgggaaattgaaggcctcctataaacgggattgttttagtgttggcagtaatgttgatatagatttttctggaccaaccatctatggctgggctgtgttggccttcgaagggtggcttgctggctatcagatgagttttgacacagccaaatccaaactgtcacagaataatttcgccctgggttacaaggctgcggacttccagctgcacacacatgtgaacgatggcactgaatttggaggttctatctaccagaaggtgaatgagaagattgaaacatccataaaccttgcttggacagctgggagtaacaacacccgttttggcattgctgctaagtacatgctggattgtagaacttctctctctgctaaagtaaataatgccagcctgattggactgggttatactcagacccttcgaccaggagtcaaattgactttatcagctttaatcgatgggaagaacttcagtgcaggaggtcacaaggttggcttgggatttgaactggaagcttaatgtggtttgaggaaagcatcagatttgtccctggaagtgaagagaaatgaacccactatgttttggccttaaaattcttctgtgaaatttcaaaagtgtgaactttttattcttccaaagaattgtaatcctccccacactgaagtctaggggttgcgaatccctcctgagggagatgcttgaaggcatgcctggaagttgtcatgtttgtgccacgtttcagttcagttctgaagtgttattaaatgtgttcctcagcgacagtgtagcgtcatgttagaggagacgatctgacccaccagtttgtacatcacgtcctgcatgtcccacaccattttttcatgaccttgtaatatactggtctctgtgctatagtggaatctttggttttgcatcatagtaaaataaaataaacccatcacatttggaacataaaaaaaaaaaaaaaaaaaactcgaactagtctctctctctcaatggcgtcagttggtgagtgtccggccccagtaccagtgaaggacaagaaacttctggaggtcaaactgggggagctgccaagctggatcttgatgcgggacttcagtcctagtggcattttcggagcgtttcaaagaggttactaccggtactacaacaagtacatcaatgtgaagaaggggagcatctcggggattaccatggtgctggcatgctacgtgctctttagctactccttttcctacaagcatctcaagcacgagcggctccgcaaataccactgaagaggacacactctgcacccccccaccccacgaccttggcccgagcccctccgtgaggaacacaatctcaatcgttgctgaatcctttcatatcctaataggaattaacctccaaataaaacatgactggtacgtgaaaaaaaaaaaaaaaaaaa

SEQ ID NO: 429 - DNA, 2277 bp, Homo sapiens
acatggcgaacgaggttatcaagtgcaaggctgcagttgcttgggaggctggaaagcctctctccatagaggagatagaggtggcacccccaaaggctcatgaagttcgaatcaagatcattgccactgcggtttgccacaccgatgcctataccctgagtggagctgatcctgagggttgttttccagtgatcttgggacatgaaggtgctggaattgtggaaagtgttggtgagggagttactaagctgaaggcgggtgacactgtcatcccactttacatcccacagtgtggagaatgcaaattttgtctaaatcctaaaactaacctttgccagaagataagagtcactcaagggaaaggattaatgccagatggtaccagcagatttacttgcaaaggaaagacaattttgcattacatgggaaccagcacattttctgaatacacagttgtggctgatatctctgttgctaaaatagatcctttagcacctttggataaagtctgccttctaggttgtggcatttcaaccggttatggtgctgctgtgaacactgccaagttggagcctggctctgtttgtgccgtctttggtctgggaggagtcggattggcagttatcatgggctgtaaagtggctggtgcttcccggatcattggtgtggacatcaataaagataaatttgcaagggccaaagagtttggagccactgaatgtattaaccctcaggattttagtaaacccatccaggaagtgctcattgagatgaccgatggaggagtggactattcctttgaatgtattggtaatgtgaaggtcatgagagcagcacttgaggcatgtcacaagggctggggcgtcagcgtcgtggttggagtagctgcttcaggtgaagaaattgccactcgtccattccagctggtaacaggtcgcacatggaaaggcactgcctttggaggatggaagagtgtagaaagtgtcccaaagttggtgtctgaatatatgtccaaaaagataaaagttgatgaatttgtgactcacaatctgtcttttgatgaaatcaacaaagcctttgaactgatgcattctggaaagagcattcgaactgttgtaaagatttaattcaaaagagaaaaataatgtccatcctgtcgtgatgtgataggagcagcttaacaggcagggagaagcgcctccaacctcacagcctcgtagagcttcacagctactccagaaaatagggttatgtgtgtcattcatgaatctctataatcaaggacaaggataattcagtcatgaacctgttttctggatgctcctccacataaataattgctagtttattaaggaatattttaacataataaaagtaatttctacatttgtgtggaaattgtcttgttttatgctgtcatcattgtcacggttgtctgccattatcttcattctgcaagggaaagggaaaggaagcagggcagtggtgggtgtctgaaacctcagaaacataacgttgaacttttaagggtctcagtccccgttgattaaagaacagatcctagccatcagtgacaaagttaatcaggacccaagtctgcttctgtgatattatcttgaagggaggtactgtgccttgttcatacctgtaccccaaattcctaggatgcatctgccttcagggggcactaaaatgtattattgaaacagcattctgggcttaaataggtgtatgtatgtgttggttgtgactgtactattctagtatagtgaactacatactgaatatccaagttctcagcacctacttttgtcaaatcttaacattttgccacttcgagatcacattgccttcctcccctccaagaggtaacaattatccacaatttgatgtttatcattcctgtgttgttgtactttcactgtgtataacctaaaccatctactctttagtactgttttatatatttttaagcctcatacttgctcattctacagcttttttcactcattattgtataattatatctgaagctctcgttcattaattttagtcctgtgtagcagaattcaattacgggaaactaccataatttatctgttctccagtccagttgaaggcatgaagttgttgccagtttctgtattataacactgtagtggaacattcttctgcattgggctactcgcgtgttacctaagacgtatcacagaataaacacatttagccttatagacattgccaaattgctcttcaaagtaaatgtgagtttttgtg

SEQ ID NO: 430 - DNA, 4190 bp, Homo sapiens
caacctccagccagtccctgggtcgggcggatcctcccagaggtggcacaatggagcgatctccaggagagggccccagccccagccccatggaccagccctctgctccctccgaccccactgaccagccccccgctgctcacgcaaagccagacccaggttctgggggccaacctgctggccctggcgcggcgggtgaggccctggcggtgctgacttcattcgggaggcggttgctggtgctgatacctgtgtatttggccggggcagtgggactcagcgtgggtttcgtgctcttcggcctcgccctctacctgggctggcgccgggtccgcgacgagaaagaacggagccttcgagcagcgaggcagctactggacgacgaggagcagctcactgcgaaaactctctatatgagtcatcgagagctacctgcctgggtcagcttcccagacgtggaaaaggctgaatggctcaataagattgtggcccaggtctggcccttcctgggccagtatatggagaagcttctggctgaaactgtggctccggctgttaggggatctaacccccatctgcaaacatttacatttacacgagtggaactgggtgaaaagccattgcgcatcattggagtcaaggttcacccaggtcagagaaaagagcagatcctgctggacttgaacatcagctatgtaggtgatgtgcagattgatgtggaagtgaagaaatatttttgcaaagcaggagtcaagggcatgcagctacatggcgttttgcgggtgatactggagccactcattggggaccttcccttcgtgggggctgtgtcaatgttcttcatccgacgcccgaccctagacatcaactggacagggatgaccaacctgctggatatcccaggacttagctcactctctgacaccatgatcatggactccattgctgccttcctcgtgttgcccaaccgattactggtgccccttgtgcctgaccttcaagatgtggctcagttgcgttcccctctgcccaggggcattattcgaattcacctgctggctgctcgagggctgagttccaaggacaaatatgtgaagggcctgattgagggcaagtcagacccatatgcacttgtgcgtttgggtacccagacattctgcagtcgtgtcattgatgaagaactcaacccacagtggggagagacttatgaggtgatggtacacgaggtcccagggcaggagattgaagtggaggtgttcgacaaggatccagataaagatgactttctgggcagaatgaagctggatgtagggaaggtgttacaggctagcgttctggatgattggttccctctacaaggtgggcaaggccaagttcacttgaggctagaatggctgtcacttttgtcagatgcagagaaactggagcaggttctacagtggaattggggagtctcctctcgaccagatcccccgtcagctgccatcttagttgtctacctggatcgggcccaggatcttcctctgaagaaggggaacaaggaacccaaccctatggtacaactgtcaattcaggatgtgactcaggagagcaaggctgtctacagtaccaactgcccagtgtgggaggaagcgttccggttcttcctacaagaccctcaaagccaggagctcgatgtgcaagtgaaggatgattccagggccctgactttaggagcactgacgctgcctctggcccgcctgctgactgccccagaactcatcctggaccagtggttccagctcagcagctctggtccaaactccagactctatatgaaactagtcatgaggatcctgtacttggattcatcagaaatatgcttccccacggtgcctggttgtcctggtgcttgggacgtggacagtgagaatccccagagaggcagcagtgtggatgccccacctcgaccctgtcacacgactcctgatagccagtttgggactgagcatgtgcttcggatccatgtattagaggcccaggacctgattgccaaagaccgtttcttggggggactggtgaagggcaagtcagacccctatgtcaaactaaagttggcaggacgaagcttccggagccatgttgttcgggaagatctcaatccccgctggaatgaggtttttgaggtgatcgtcacatcagttccaggccaagagctagaggttgaagtctttgacaaggacttggacaaggatgattttctgggcaggtgtaaagtgcgtctcaccacagtcttaaacagtggcttccttgatgagtggctgaccctggaggatgtcccatctggccgcctgcacttgcgcctggagcgtctcaccccccgtcccactgctgctgagttagaggaggtgctgcaggtgaatagtttgatccagactcagaagagtgcggagctggctgcggccctgctatccatctatatggagcgggcagaggacctcccgctgcgaaaaggcaccaagcacctcagcccttatgctactctcactgtgggagatagttctcataaaaccaagactatttcgcaaacttcagcccctgtctgggatgagagtgcctcctttctcatcaggaaaccacacactgagagcctagagttgcaggttcggggtgagggcactggcgtgctgggctcattatccctgcccctctcagagctcctcgtggctgaccagctctgcttggaccgctggtttacactcagcagtggtcaggggcaggtgctactgagagcacagctagggatcctggtgtcccagcactcgggagtggaagctcatagccacagctacagccacagctcctcatcgctgagtgaagaaccagagctctcggggggaccccctcacatcacctcctcagccccagagctccggcagcgcctaacacatgttgacagtccccttgaggctccagccgggcctctgggccaggtgaaactgactctgtggtactacagtgaagaacgaaagctggtcagcattgttcatggttgccggtcccttcgacagaatggacgtgatcctcctgatccctatgtgtcactgttgctactgccagacaagaaccgaggcaccaagaggaggacctcacagaagaagaggaccctgagtcctgaatttaatgaacggtttgagtgggaactccccctggatgaggcccagagacgaaagctggatgtctctgtcaagtctaattcctccttcatgtcaagagagcgtgagctgctggggaaggtgcagctggacctagctgagacagacctttcccagggtgtagcccggtggtatgacctgatggacaacaaggacaagggcagctcctaggagctggcgagtcccagcctgactgctctgtcttcctgccttcgtctcgctccatcaccgcctcaatgtgatgagcctaaagctagggtccaagggcagagcctgtgcccttcagccctttcacctaacaggcccatattcgggcctttgcctgaccaaagagaagaaccgtatgttccctttactgcacggcctttatccttctgggcccctggggcggggacctgagctggctgtttcctgctttgcctgcacattgttctcccttcctcccaactcctcagggccttctgtatctgtgcctggccagtggcagcactagcagtggtattagcttatgccaaatacagctttggaaggatctttttttctttaactagatggtcaccttcttccctaccacacatgggtgggaaggtggacaggctaacctctccagctgtgagcctcttagactactgcatgtagcaaatgttcagcagctcaggcccccatgtccagttctgtccccactgtcctcaaccctgtcctgaaaattctactgctttgatggctggggccagtctcttgtcactttggaaactgaggacgcgtggattctactcaagcctccaagtagtggcatatcagtcttggagctcctagctggtgatacggagagggctttggaggacttgggacagcagggccaatttttttgcccaagtgcctaggctgctaactcactgactagaacttaatctggtactttacagttttgcaccaactctgccaagccactggatcttacattaaacatcatactcaaaaaaaaaaaaaaaaaaa

SEQ ID NO: 431 - DNA, 985 bp, Homo sapiens
gcctttccgtcaattcctgtcctgggcgtacgtcaagatggcggcgtctgtattaaacaccgtgctgaggcggcttcctatgctatctctcttccgaggttctcacagagttcaggttcccctccagactctttgcaccaaagctccctctgaggaagattctttgtcctcagttcccatttctccttataaggatgagccctggaaatatctggaatcagaagaataccaggagcgatatggttctcgccccgtctgggctgactaccgccgcaaccacaagggtggtgtacccccacagcggactcggaagacatgtattcgtcggaataaagttgttgggaatccctgccccatctgtcgagatcacaagttgcatgttgactttaggaacgtgaagctcttggagcaatttgtctgcgcccacacgggtatcatcttctatgctccatacacaggagtctgtgtgaagcagcacaagcggttgacccaggccatccagaaagccagggatcatggtctcctcatttaccacatcccccaggttgaaccacgggaccttgacttcagtacctctcatggggctgtgagtgctactccgccagcccccaccctggtctcaagtgacccctggtacccatggtacaactggaaacagccaccggagagagaactgtctcgccttcgccggctttaccagggtcatctccaagaagagagtggccccccacctgagtcaatgcccaagatgccccctagaacaccagcggaagcctcctccactgggcagacaggccctcagagtgctctgtaggagctgtagactgggaagagaggccaggcgtggtggctcactcctgtaatcccagcactttgggaagccaaggtgggctgatcacttgatcccaggagtttgagaccagcctgggcaccatggtgaaacctcgtctttaccaaaaaaaaaaaaaaaaaaaaaaaaaaaaaa

SEQ ID NO: 432 - DNA, 965 bp, Homo sapiens
cagcttgtcctctatgacttacccagaaggcaacgcttctctttctggtcaaaatggctggtaagcaggccgtttcagcatcaggcaagtggctggatggtattcgaaaatggtattacaatgctgcaggattcaataaactggggttaatgcgagatgatacaatatacgaggatgaagatgtaaaagaagccataagaagacttcctgagaacctttataatgacaggatgtttcgcattaagagggcactggacctgaacttgaagcatcagatcttgcctaaagagcagtggaccaaatatgaagaggaaaatttctaccttgaaccgtatctgaaagaggttattcgggaaagaaaagaaagagaagaatgggcaaagaagtaatcatgtagttgaagtctgtggatgcagctgttatgaagatggttaaacttgaaacaaacaattttaagaattatttggtctgaagatgttttactttaaataaatgtctattgtaatggctggagtttttgaattccaaaccttatactgaataactactgaatccctttactgttaaatttttttccaaactttcaagatatatttagttgtgtttaactgctacttggagctcagaagccactttatcagttttcctcactggttggatagcctatcagtttatggaaggatataacttccgtaagttacatccttatggaagctactgaataaaagaagggggtatgcaccccctagtttgccaagattgagaaatagcctcttcactggtatgcaaacagatttgattttgcatcctatcatttaaaaagaaattatgtctgcaccccaacataggcatacttaagtaatatacatactcctgtgctaacatgtatactagaaaacaaaaagatgttagaaaaataaaagtataaagacaaatcaaaaaaaaaaaaaaaaaaaaaaaaaaaa

SEQ ID NO: 433 - DNA, 4053 bp, Homo sapiens
gaattcgcggccgcgtcgaccaagatcattcctgggagtgaagtaaaacgggaagaaccagaagctttgtatgcagctgtaaataagaaacctacctcggcagcctattcagttggagaagaatatattgcactttatccatattcaagtgtggaacctggagatttgactttcacagaaggtgaagaaatattggtgacccagaaagatggagagtggtggacaggaagtattggagatagaagtggaatttttccatcaaactatgtcaaaccaaaggatcaagagagttttgggagtgctagcaagtctggagcatcaaataaaaaacctgagattgctcaggtaacttcagcatatgttgcttctggttctgaacaacttagccttgcaccaggacagttaatattaattctaaagaaaaatacaagtgggtggtggcaaggagagttacaggccagaggaaaaaagcgacagaaaggatggtttcctgccagtcatgttaaacttttgggtccaagcagtgaaagagccacacctgcctttcatcctgtatgtcaggtgattgctatgtatgactatgcagcaaataatgaagatgagctcagtttctccaagggacaactcattaatgttatgaacaaagatgatcctgattggtggcaaggagagatcaacggggtgactggtctctttccttcaaactacgttaagatgacgacagactcagatccaagtcaacagtgacccaatgttgtcttccagttgtgaaagcaccccagagacccactatccaagtttcactctagcgtggaggcagggcaggcagccctgatcaaatatctcctacacaattcgtttacttcgtttgaatgttagagccacttgtgattatttttttgtgtttctaacttacagtttaaatttatttgtaaaaagttaaaggatagtgggtctttgtgtggctttccctgctgttcactctggcatctttagcatttttcttcttttttaatttgataattgtaggtcattagcatgcatattgagtttgcccttatgtggtgggagttcaaacacacaaagacccactatttgcacaaactattcttactggtttggaataggctgccatgcttttttaatgttattgcaacatgtgtattcatttacagaattcagataaaatttgcttatgttctgctattatgtttgatctaatcctaatcacagtgagctcttaattagctcaatatgtggtttgccctcaagtgtgcactgtttattactttgtaatatgccactatgagtactgacatttagatatgtttaaaggccaaaaactggaaacagccatgccctgttttctgtgtatttgggatgggaataacaacattttgggggagctttttaaatctcagagaaaaggaaagtggcctgctctggcaggtatgtgcagtgtttcatttgttccagtcccaaaaatgagcactgtcctatggtagttcgcttaggatctttatgtgctctgggctaatgaaggtactgcatcatgtgctgcagcgtgtgtattctttttcgatgacctataaagggattatttttgaggaatgaaaggctcccatcattgactgtgagatgggaaaaacctttcctagcttagagcatttatatcttaatccattttaaagtcagagttcattgttacctgttttaatcaggtgactacatgtcccagtatacaaaggggcactggttgacattcttcttaatgtatttagtaaatatcataagaaatcctttaagagtttaaatgtccccaaaacagacatgcgggctctagtcaagaatgaattagagtgaaggaaagctgtgtaacacctggcattcctctgtgttcatggagcttctttgaggctctaagattgattttaccatcagacttctctaatacctgttcttcaaccatattggctactttgacataagaatttacttcttttcctggaatggaaaacactttaaaaaataataacaaacattattataaactaatatatgtgagagtacttagttgatacaaaaaggagttttagtagacagtattatactatatttgaaaatcaaggagaattttatgcaacttaaaatgtttacaaactgcagtgcaatctactgtttgtgaatgtcaaagtatcaggaaaagtgtatatacaatcacagagtcatatttcctcacaaagttatttacaaagagtgaaatatgtttttgtacctctcagtttcagttagaggcatattttgtgcaatatttatgttaatgtgcctatacattatgaatgaattatttcagtcatacattgcctaaatcataactttatgatgcttgggaaagaatcaacagttaaaacttcataaagttctaatgtctgtgttccaaaatacatcacattattaggatgtagggagataagtatgtgtgctccctagggtggcaatttctagttactagaccacctctatttttagcatttggcatcctcatgatacttttataaatatgacattaataggaaagcaataatttcattttacagatagaataacagatttgcctgcattcactgaaagagtgcaaagactgggtccttgtgaattcaactgactctcccaaattgtattaattacctgttcttgccttttattttctgaacttgctgcttttgcattcttttgagttcaaagacagttactttaaatccatttttaaaccctcggggtagaaatcataccactgttaatcagccacattatttggtctaaggttttttctttataattctgaaactgagtttatctaatacattgatgaattatttcaaacgtatttttatagttcaaatcagttcacttttacactgataaatataaattactaggaatgaccttcagacagcgtttagcatctgtaaccaacctgaaaataatatgttcatcaggtacctatggattaaatcatatactggcgtatttaagctgaatgtcagtctggaaaataaatttactatattaactgaaataccactctttgtgtaggtattttgtcatgtatttaagaaaaagataaaaagaatggaaatcatatgacataataacttaagtctttcttaaaagtgcatgctgtcttttgcaatacctcattcagccaagtatttgttctcttcctcattcagtataagtcagctttcaatttgcttagaaggcaacattagaaggttagagttcatcagaaacatagaattttaaaatgtgagttcaactgaataaatttgaatttctgtaggaggtaaagaatcaaaatacctgtttaaagattgcaattgcaatgtataataatcacttttaaattatttgattaaaccttttaggttttccagaaatgaaaaaaatcagttctaaaaccaaagctgatttttagaaaatttgagaatgtaaatcagccctatccataatatagtttctctaaaactttatcttaaagagtcattttaaaataatataactattaaaaatgtaactgatatttaaatgttttgaaataaaacattttaaaatataaatactgtagtttaaaagaaagaaactgggggaaagaaaagtagagaaagaaataccaattccagtccaaagctttatttgccagttttcttagaatgacttttaccagtttatgaattcttgtaaacagaatctataatggaaatactgaaagacttttgcctaaagtggcattattgaatgctgctgtgatgctactgtaatgtaataaattattaaattgttgcaaagtgctgtttttgccttaaaattttattttgtgtgtcttgaaaattatagtattaaaggtattgagattgtgcaaatgctgggcacgcttggcatgagataatctgtttttatttttaccaaattgtaatataactatgcaagtgtgtttattaaaagaacaccaactataaaaaaaagtcgacgcggccgcgaattccagctgac

SEQ ID NO: 434 - DNA, 781 bp, Homo sapiens
ggcacgagggtgtcctgcgcgctacgccgtctgtttctagggcaacgccggcgtctcttagcaaccgcgcgcggcctaggtgggtccccccggcacccccagacctgccatggcgaccgcgagtcctagcgtctttctactcatggtcaacgggcaggtggagagcgcccagtttccagagtatgatgacctctactgcaagtactgctttgtgtacggccaggactgggcccccacagcgggtctggaggaggggatctcacagatcacatccaagagccaagatgtgcggcaagcactggtgtggaacttccccattgatgtcacctttaaaagcaccaacccctacggctggccacagatcgtgctcagcgtgtatggaccagatgtgttcgggaacgatgtggttcgaggctatggggccgtgcacgtgcccttctcacctggccggcacaaaaggaccatccccatgtttgtcccagaatctacgtctaaactgcagaagtttacaagtttgtgcctggtcgcctcctcagatctgcaagctgctccacccactgaggacaaatagaaacaggtcccctgggagtgctgagtcacggggctcccttcagccctgttccagcagcagaaggccgggcgattttaccctgtgccctgtgaaaaatctttgtgtctgagggagcagaggaaaaactcttgtcagatgggaaaaatgctcatgacataatgtgacattaaaaggtgggaaacaagaggatataaaaaaaaaaaaaaaaaa

SEQ ID NO: 435 - DNA, 5175 bp, Homo sapiens
  modified_base (4596)..(4596): a, c, g, t, unknown, or other
gctgctgctgcagtgggacaggtggcggcgaccggcggcgtccgaggagatttaatccagagactgacttcactatagaacccacagttgtatcaatggttggggaaagatagtggcaacaggcaaaggagaaacagctctgacatacaaagaaaatgagtatgctaaagccaagtgggcttaaggcccccaccaagatcctgaagcctggaagcacagctctgaagacacctacggctgttgtagctccagtagaaaaaaccatatccagtgaaaaagcatcaagcactccatcatctgagactcaggaggaatttgtggatgactttcgagttggggagcgagtttgggtgaatggaaataagcctggatttatccagtttcttggagaaacccagtttgcaccaggccagtgggctggaattgttttagatgaacccataggcaagaacgatggttcggtggcaggagttcggtatttccagtgtgaacctttaaagggcatatttacccgaccttcaaagttaacaaggaaggtgcaagcagaagatgaagctaatggcctgcagacaacgcccgcctcccgagctacttcaccgctgtgcacttctacggccagcatggtgtcttcctccccctccaccccttcaaacatccctcagaaaccatcacagccagcagcaaaggaaccttcagctacgcctccgatcagcaaccttacaaaaactgccagtgaatctatctccaacctttcagaggctggctcaatcaagaaaggagaaagagagctcaaaatcggagacagagtattggttggtggcactaaggctggtgtagtccggtttcttggggagaccgactttgccaagggggagtggtgtggcgtggagttagatgagccacttgggaagaatgatggcgctgttgctggaacaaggtattttcagtgtcaacccaaatatggcttgttcgctcctgtccacaaagttaccaagattggcttcccttccactacaccagccaaagccaaggccaacgcagtgaggcgagtgatggcgaccacgtccgccagcctgaagcgcagcccttctgcctcttccctcagctccatgagctcagtggcctcctctgtgagcagcaggcccagtcggacaggactattgactgaaacctcctcccgttacgccaggaagatctccggtaccactgccctccaggaggccctgaaggagaagcagcagcacattgagcagctgctggcggaacgggatctggagagggcggaggtggccaaggccacgagccacgtgggggagatagagcaggagctagctctggcccgggacggacatgaccagcatgtcctggaattggaagccaaaatggaccagctgcgaacaatggtggaagctgctgacagggagaaggtggagcttctcaaccagcttgaagaggagaaaaggaaggttgaggaccttcagttccgggttgaagaagaatcaattaccaaaggtgatcttgaggtggctacagtttcagaaaagtcacgtataatggaactggagaaagacctagcattgagagtacaggaagtagctgagctccgaagaaggctagagtccaataagcctgctggggatgtggacatgtcactttcccttttgcaagagataagctctttgcaagaaaagttagaagtcacccgtactgaccaccagagagaaataacttctctgaaggagcattttggagcccgggaagaaactcatcagaaggagataaaggctctgtataccgccacggaaaagctttccaaagagaacgagtcattgaaaagcaagctggagcatgccaacaaagagaactcagatgtgatagctctatggaagtccaaactggagactgccatcgcatcccaccagcaggcgatggaagaactgaaggtatctttcagcaaagggcttggaacagagacggcagaatttgctgaactaaaaacacaaatagagaaaatgagactagattaccaacacgaaatagaaaatttgcagaatcaacaagactctgaacgggctgcccatgctaaagagatggaagccttgagggctaaactgatgaaagttattaaagaaaaggaaaacagtctggaagccatcaggtcgaaactggacaaagcagaagaccagcatctcgtagaaatggaagacacgttaaacaaattacaggaagctgaaataaaggtaaaggagctagaggtactgcaagccaaatgcaatgaacaaaccaaggttattgataattttacatcacagctcaaggctactgaagaaaagctcttggatcttgatgcacttcggaaagccagttccgaaggtaaatcggaaatgaagaaacttagacagcagcttgaggcagctgagaaacagattaaacatttagagattgaaaagaatgctgaaagtagcaaggctagtagcattaccagagagctccaggggagagagctaaagcttactaaccttcaggaaaatttgagtgaagtcagtcaagtgaaagagactttggaaaaagaacttcagattttgaaagaaaagtttgctgaagcttcagaggaggcagtctctgttcagagaagtatgcaagaaactgtaaataagttacaccaaaaggaggaacagtttaacatgctgtcttctgacttggagaagctgagagaaaacttagcagatatggaggcaaaatttagagagaaagatgagagagaagagcagctgataaaggcaaaggaaaaactggaaaatgacattgcagaaataatgaagatgtcaggagataactcttctcagctgacaaaaatgaacgatgaattacgtctgaaagaaagagatgtagaagaattacagctaaaacttacaaaggctaatgaaaatgcaagttttctgcaaaaaagtattgaggacatgactgtcaaagctgaacagagccagcaagaagcagctaaaaagcatgaggaagaaaagaaagaattggagaggaaattgtcggacctggaaaagaaaatggaaacaagccacaaccagtgtcaggagctgaaagccaggtatgagagagccacttctgagacaaaaaccaagcatgaagaaatcctacagaacctccagaagacgctgctggacacagaggacaagctgaagggcgcacgggaggagaacagtggcttgctgcaggagctggaggagctgagaaagcaagccgagaaagccaaagctgctcaaacagcggaagatgccatgcagataatggaacagatgaccaaagagaagactgagactctggcctccttggaggacaccaagcaaacaaatgcaaaactacagaatgaattggacacacttaaagaaaacaacttgaaaaatgtggaagagctgaacaaatcaaaagaactcctgactgtagagaatcaaaaaatggaagaatttaggaaagaaatagaaaccctaaagcaggcagcagctcagaagtcccagcagctttcagcgttgcaagaagagaacgttaaacttgctgaggagctggggagaagcagggacgaagtcacaagtcatcaaaagctggaagaagaaagatctgtgctcaataatcagttgttagaaatgaaaaaaagagaatccaagttcataaaagacgcagatgaagagaaagcttccttgcagaaatccatcagtataactagtgccttactcacagaaaaggatgccgagctggagaaactgagaaatgaggtcacagtgctcaggggagaaaacgcctctgccaagtccttgcattcagttgttcagactctagagtctgataaggtgaagctcgagctcaaggtaaagaacttggagcttcaactcaaagaaaacaagaggcagctcagcagctcctcaggtaatacagacactcaggcagacgaggatgaaagagcccaggagagtcagattgatttcctaaattcagtaatagtggaccttcaaaggaagaatcaagacctcaagatgaaggtggagatgatgtcagaagcagccctgaatgggaacggggatgacctaaacaattatgacagtgatgatcaggagaaacagtccaagaagaaacctcgcctcttctgtgacatttgtgactgctttgatctccacgacacagaggattgtcctacccaggcacagatgtcagaggaccctccccattccacacaccatggcagtcggggtgaggaacgcccatactgtgaaatctgtgagatgtttggacactgggccaccaactgcaatgacgacgaaaccttctgatgaagcctccagtggagaactgggcttgctcagacgcactcgcattgacacaacgtaacaccagcattgtgtgtgcagacttcaggagaactcatgttattttttaaccccgtcaacaaatctaggaaaatattttgatcttcaacaaattgccctttagtctccccgtatgagttagaataataaatatttagtaggtgagcttttcacctcgaattttgttttcttgatttttacgtttgaagacattgcaccagatgcnattacatttattggccccccgaccttgtagaaaaacccctaccctcacaataccttatttaagtaactttaaattatgccgttacttttcatatttgcactaagatatttccaggctgcatttgtatatttagattttttggttaagctttgacactggaatgagttgaaaaaatgtgccattttgcattttcatctactcatttaaagtattttattcttattcaaagaaatatctgagctctttgcactacctgttatcagtagtgcctttacttcaggcttgataatacttaggtgtgattataaaatcatgaagcaggtaaagggaggggcaagcccccaaactgctgtggggacattttataatctatatgctgcacccacttaatctactgtggtgttttgtttattagttttgcataatttcagcttctatatattgtatgtatatattttttaaaaatctatattttgggaaaaaaacatacacaatgtgtctttctttttggacatttacctttttgaaaaagaaaacacttaaaatgatcattaggacataacagactagggaattccg

SEQ ID NO: 436 - DNA, 653 bp, Homo sapiens
  modified_base (330)..(330): a, c, g, t, unknown, or other
aggaggagccgtgtgccctggcactgagcggccgcggggtgcgagatgagcactatgttcgcggacactctcctcatcgtttttatctctgtgtgcacggctctgctcgcagagggcataacctgggtcctggtttacaggacagacaagtacaagagactgaaggcagaagtggaaaaacagagtaaaaaattggaaaagaagaaggaaacaataacagagtcagctggtcgacaacagaaaaagaaaatagagagacaagaagagaaactgaagaataacaacagagatctatcaatggttcgaatgaaatccatgtttgctattggnttttgttttactgccctaatgggaatgttcaattccatatttgatggtagagtggtggcaaagcttccttttacccctctttcttacatccaaggactgcctcatcgaaatctgctgggagatgacaccacagactgttccttcattttcctgtatattctctgactatgtcgattcgacagaacattcagaagattctcggctttgccctttaacagccggcaccaagcagcaggtggattttttgggccaccacctccttctggaagtttttttgaacttaagacctattattttctattatcttttttagaccacacact

SEQ ID NO: 437 - DNA, 2540 bp, Homo sapiens
gaattccgcgccagggccgaccgttcttcctgtactacgcttcccaccacactcactaccctcagttcagtggacaaagcttcaccaagcgctcaggccgtgggccatttggggactccttgatggagctggatggagctgtaggggccttgatgacaactgtgggggacctcggtctgctggaagagacactagtcatcttcactgcagataacggtcctgagttgatgcgcatgtccaatggcggctgctctggcctcttgagatgtggaaaaggaacaacttttgaaggtggcgtccgagagcctgccttggtctactggccaggtcacattactcctggtgtaacccatgagctggccagctctctggacctgctgcccaccctggcagccctgaccggggtccgctgcccaacgtcaccttggatggtgttgacatcagccccttgctgctaggcacaggcaagagcccacggaagtctgtcttcttctacccgccctacccagacgagatccatggggtctttgctgttcggaatgggaaatacaaggctcatttcttcacccagggctccgcccacagtgacaccacttcagatcctgcctgtcatgctgccaaccgtctgacggctcatgagcccccactgctctacgacttatctcaggaccctggggagaactacaatgttttggaaaaccacagagggaagagatgggaaaatggctgtccaggagttttcggaattcgggttactgctgcagcttttggggtcgcccggccgccgctattacagtcttcccccgcatcagaaggttccattgccttctctttcccccacaatgcaggcaggcaccatagcccgttgggaaaaaaaagagggggacaaaatcaatgaaggtgacctaattgcagaggttgaaactgataaagccactgttggatttgagagcctggaggagtgttatatggcaaagatacttgttgctgaaggtaccagggatgttcccatcggagcgatcatctgtatcacagttggcaagcctgaggatattgaggcctttaaaaattatacactggattcctcagcagcacctaccccacaagcggccccagcaccaacccctgctgccactgcttcgccacctacaccttctgctcaggctcctggtagctcatatccccctcacatgcaggtacttcttcctgccctctctcccaccatgaccatgggcacagttcagagatgggaaaaaaaagtgggtgagaagctaagtgaaggagacttactggcagagatagaaactgacaaagccactataggttttgaagtacaggaagaaggttatctggcaaaaatcctggtccctgaaggcacaagagatgtccctctaggaaccccactctgtatcattgtagaaaaagaggcagatatatcagcatttgctgactataggccaaccgaagtaacagatttaaaaccacaagtgccaccacctaccccacccccggtggccgctgttcctccaactccccagcctttagctcctacaccttcgacaccctgcccagctactcctgctggaccaaagggaagggtgtttgttgaccctcttgcaaagaagttggcagtagagaaagggattgatcttacacaagtaaaagggacaggaccagatggtagaatcaccaagaaggatatcgactcttttgtgcctagtaaagttgctcctgctccggcagctgttgtgcctcccacaggtcctggaatggcaccagttcctacaggtgtcttcacagatatcccaatcagcaacattcgtcgggttattgcacagcgattaatgcaatcaaagcaaaccatacctcattattaccttctatcgtgtaaatatggagaagttttgttggtacggaaagaacttaataagatattagaagggagaagcaaaatttctgtcaatgacttcatcataaaagcttcagctttggcatgtttaaaagttcccgaagcaaattcttcttggatggacacagttataagacaaaatcatgttgttgatgtcagtgttgcggtcagtactcctgcaggactcatcacacctattgtgtttaatgcacatataaaaggagtggaaaccattgctaatgatgttgtttctttagcaaccaaagcaagagagggtaaactacagccacatgaattccagggtggcacttttacgatctccaatttaggaatgtttggaattaagaatttctctgctattattaacccacctcaagcatgtattttggcaattggtgcttcagaggataaactggtccctgcagataatgaaaaagggtttgatgtggctagcatgatgtctgttacactcagttgtgatcaccgggtggtggatggagcagttggagcccagtggcttgctgagtttagaaagtaccttgaaaaacctatcactatgttgttgtaactaactcaagaatttctaaactctcccaggtcacactgattcattcttaacaagcccgaattc

SEQ ID NO: 438 - DNA, 1107 bp, Homo sapiens
gggaaattaagtttcttgcggagtacggtggggattgcagctgctgagcagggattctggaaagcattgcgtacctgagcccccagcatggcgggcctaaagcggcgggcaagccaggtgtggctagaagagcatggtgagcaggaacatgggctgtacagcctgcaccgcatgtttgacatcgtgggcactcatctgacacacagagatgtgcgcgtgctttctttcctctttgttgatgtcattgatgaccacgagcgtggactcatccgaaatggacgtgacttcttattggcactggagcgccagggccgctgtgatgaaagtaactttcgccaggtgctgcagctgctgcgcatcatcactcgccacgacctgctgccctacgtcaccctcaagaggagacgggctgtgtgccctgatcttgtagacaagtatctggaggagacatcaattcgctatgtgacccccagagccctcagtgatccagaaccaaggcctccccagccctctaaaacagtgcctccccactatcctgtggtgtgttgccccacttcgggtcctcagatgtgtagcaagcggccagcccgagggagagccacacttgggagccagcgaaaacgccggaagtcagtgacaccagatcccaaggagaagcagacatgtggtgaggaaattcaagggttccagagatggagcagacttgaaggagaatataaagaactgctgggacactgggcagtttatgctattcagtacatcagactgcgggttcgggctgaatactgccagcatgagactgctctgcagggcaatgtcttctctaacaagcaggacccacttgagcgccagtttgagcgctttaaccaggccaacaccatcctcaagtcccggacctgggctccatcatctgtaacatcaagttctctgagctcacctacctcgatgcattctggcgtgactacatcaatggctctttattagaggcacttaaaggtgtcttcatcacagactccctcaagcaagctgtggggccatgaagccatcaagctgctgggtaaatgtaggacggagggagggactatggaggctggggccgacaggaaa

SEQ ID NO: 439 - DNA, 1381 bp, Homo sapiens
tgggtgttggaggctttaaggtagctttaaattcgtgttgtcctgggagctcgcccttttcggctggagtcgggctttacggcgccggatggctctggacgtgaagtctcgggcaaagcgttatgagaagctggacttccttggggagggacagtttgccaccgtttacaaggccagagataagaataccaaccaaattgtcgccattaagaaagagtctctgctggtagccactacagctgtgaatgtgctgtgtcatacctgaagccaatatgtctcggagtttcacctgaggcccatgatcaaacttggacatagatcagaagctaaagatggtataaatagaaccgccttaagagagataaaattattacaggagctaagtcatccaaatataattggtctccttgatgcttttggacataaatctaatattagccttgtctttgattttatggaaactgatctagaggttataataaaggataatagtcttgtgctgacaccatcacacatcaaagcctacatgttgatgactcttcaaggattagaatatttacatcaacattggatcctacatagggatctgaaaccaaacaacttgttgctagatgaaaatggagttctaaaactggcagattttggcctggccaaatcttttgggagccccaatagagcttatacacatcaggttgtaaccaggtggtatcgggcccccgagttactatttggagctaggatgtatggtgtaggtgtggacatgtgggctgttggctgtatattagcagagttacttctaagggttccttttttgccaggagattcagaccttgatcagctaacaagaatatttgaaactttgggcacaccaactgaggaacagtggccggacatgtgtagtcttccagattatgtgacatttaagagtttccctggaatacctttgcatcacatcttcagtgcagcaggagacgacttactagatctcatacaaggcttattcttatttaatccatgtgctcgaattacggccacacaggcactgaaaatgaagtatttcagtaatcggccagggccaacacctggatgtcagctgccaagaccaaactgtccagtggaaaccttaaaggagcaatcaaatccagctttggcaataaaaaggaaaagaacagaggccttagaacaaggaggattgcccaagaaactaattttttaaagagaacactggacaacattttactactgagggaaatagccaaaaaggcaaataatggaaaaatagtaaacattaagtaaatgctgtagaagtgagtttgtaaatattctacacatgtaaaatatgtaaaactatgggttatttttattaaatgtattttaaaaa

SEQ ID NO: 440 - DNA, 5099 bp, Homo sapiens
  modified_base (45)..(46): a, c, g, t, unknown, or other
  modified_base (73)..(73): a, c, g, t, unknown, or other
  modified_base (3089)..(3094): a, c, g, t, unknown, or other
  modified_base (3096)..(3096): a, c, g, t, unknown, or other
  modified_base (3099)..(3102): a, c, g, t, unknown, or other
  modified_base (3104)..(3106): a, c, g, t, unknown, or other
  modified_base (3109)..(3109): a, c, g, t, unknown, or other
  modified_base (3111)..(3111): a, c, g, t, unknown, or other
  modified_base (4273)..(4280): a, c, g, t, unknown, or other
  modified_base (4282)..(4282): a, c, g, t, unknown, or other
  modified_base (4332)..(4338): a, c, g, t, unknown, or other
  modified_base (4340)..(4340): a, c, g, t, unknown, or other
  modified_base (4342)..(4343): a, c, g, t, unknown, or other
  modified_base (4345)..(4346): a, c, g, t, unknown, or other
  modified_base (4348)..(4349): a, c, g, t, unknown, or other
  modified_base (5001)..(5001): a, c, g, t, unknown, or other
  modified_base (5082)..(5082): a, c, g, t, unknown, or other
aattcgcggccgcgtcgactacggctgcgagaagacgacagaagnngacctccatcagctcgccgcgcagcgnggctgtatttgcggcctgtgcgagtaggcgcttgggcactcagtctccctggcgagcgacgggcagaaatctcgaaccagtggagcgcactcgtaacctggatcccagaaggtcgcgaaggcagtaccgtttcctcagcggcggactgctgcagtaagaatgtcttttccacctcatttgaatcgccctcccatgggaatcccagcactcccaccagggatcccacccccgcagtttccaggatttcctccacctgtacctccagggaccccaatgattcctgtaccaatgagcattatggctcctgctccaactgtcttagtacccactgtgtctatggttggaaagcatttgggcgcaagaaaggatcatccaggcttaaaggctaaagaaaatgatgaaaattgtggtcctactaccactgtttttgttggcaacatttccgagaaagcttcagacatgcttataagacaactcttagctaaatgtggtttggttttgagctggaagagagtacaaggtgcttccggaaagcttcaagccttcggattctgtgagtacaaggagccagaatctaccctccgtgcactcagattattacatgacctgcaaattggagagaaaaagctactcgttaaagttgatgcaaagacaaaggcacagctggatgaatggaaagcaaagaagaaagcttctaatgggaatgcaaggccagaaactgtcactaatgacgatgaagaagccttggatgaagaaacaaagaggagagatcagatgattaaaggggctattgaagttttaattcgtgaatactccagtgagctaaatgccccctcacaggaatctgattctcaccccaggaagaagaagaaggaaaagaaggaggacattttccgcagatttccagtggccccactgatcccttatccactcatcactaaggaggatataaatgctatagaaatggaagaagacaaaagagacctgatatctcgagagatcagcaaattcagagacacacataagaaactggaagaagagaaaggcaaaaaggaaaaagaaagacaggaaattgagaaagaacggagagaaagagagagggagcgtgaaagggaacgagaaaggcgagaacgggaacgagaaagggaaagagaacgtgaacgagaaaaggagaaagaacgggagcgggaacgagaacgggatagggaccgtgaccggacaaaagagagagaccgagatcgggatcgagagagagatcgtgaccgggatagagaaaggagctcagatcgtaataaggatcgcagtcgatcaagagaaaaaagcagagatcgtgaaagggaacgagagcgggaaagagagagagagagagaacgagagcgagaacgagaacgggagcgagagagagagcgagagagggaacgggagcgagaaagagaaaaagacaaaaaacgggaccgagaagaagatgaagaagatgcatacgaacgaagaaaacttgaaagaaaactccgagagaaagaagctgcttatcaagagcgccttaagaattgggaaatcagagaacgaaagaaaacccgggaatatgagaaagaagctgaaagagaagaagaaagaagaagagaaatggccaaagaagctaaacgactaaaagaattcttagaagactatgatgatgatagagatgaccccaaatattacagaggaagtgctcttcagaaaaggttgcgtgatagagaaaaggaaatggaagcagatgaacgagataggaagagagagaaggaggagcttgaggaaatcaggcagcgccttctggcagaagggcatccagatccagatgcagagctccagaggatggaacaagaggctgagaggcgcaggcagccacaaataaagcaagagccagaatcagaagaggaggaagaagaaaagcaagaaaaagaagaaaaacgagaagaacccatggaagaggaagaggagccagagcaaaagccttgtctgaaacctactctgaggcccatcagctctgctccatctgtttcctctgccagtggcaatgcaacacctaacactcctggggatgagtctccctgtggtattattattcctcatgaaaactcaccagatcaacagcaacctgaggagcataggccaaaaataggactaagtcttaaactgggtgcttccaatagtcctggtcagcctaattctgtgaagagaaagaaactacctgtagatagtgtctttaacaaatttgaggatgaagacagtgatgacgtaccccgaaaaaggaaactggttcccttggattatggtgaagatgataaaaatgcaaccaaaggcactgtaaacactgaagaaaagcgtaaacacattaagagtctcattgagaaaatccctacagccaaacctgagctcttcgcttatcccctggattggtctattgtggattctatactgatggaacgtcgaattagaccatggattaataagaaaatcatagaatatataggtgaagaagaagctacattagttgattttgtttgttctaaggttatggctcatagttcaccccagagcattttagatgatgttgccatggtacttgatgaagaagcagaagtttttatagtcaaaatgtggagattattgatatatgaaacagaagccaagaaaattggtcttgtgaagtaaaactttttatatttagagttccatttcagatttcttctttgccacccttttaaggactttgaatttttctttgtctttgaagacattgtgagatctgtaattttttttttttgtagaaaatgtgaattttttggtcctctaatttgttgttgccctgtgtactcccttggttgtaaagtcatctgaatccttggttctctttatactcaccaggtacaaattactggtatgttttataagccgcagctactgtacacagcctatctgatataatcttgttctgctgatttgtttcttgtaaatattaaaacgactccccaattannnnnnanaannnnannnaanantgaaatgtactgtataggaaccaacatgaacaattttaattgaaaacaccagtcataaactattaccacccccactctcttttgatcagaaatggcaagcccttgtgaaggcatggagtttaaaattggaatgcaaaaattagcagacaatccattcctactgtatttctgtatgaatgtgtttgtgaatgtatgtgtaaaagtctttcttttccctaatttgctttggtggggtccttaaaacatttcccaactaaagaatagaattgtaaaggaaaagtggtactgttccaacctgaaatgtctgttataattaggttattagtttcccagagcatggtgttctcgtgtcgtgagcaatgtggtttgctaactggatggggttttcttattaataagatggctgcttcagcttctcttttaaaggaatgtggatcatagtgatttttccttttaattttattgctcagaaatgaggcatatcctaaaaatcctggagagctgtatttaatgcatttttgcactaattggtccttagtttaattctattgtatctgtttatttaacaaaaaattcatcataccaaaaagtgtaagtgaaaaccccctttaaaacaaaacaaaaaaatgaaataaaattaggcaaattgacagacagtgagagttttacaaacatgataggtattctgctcggcaatttgtaagtttacatgttatttaaggataaaggtaaatcattcaaggcagttaccaaccactaactatttgttttcatttttgtcttgtagaaggtttatatcttgttttaccttggctcattagtgtttaaaaatgtactgatgatgtgcttagagaaattcctggggctttcttcgttgtagatcagaatttcaccagggagtaaaattacctgaaaacgtaagaagttttaaacagcttttcacacaaattagatgcaactgttcccatgtctgagtacttatttaaaagaaaggtaaagattggcctgttagaaaaagcataatgtgagctttggattactggattttttttttttttaaacacacctggagaggacatttgaaaacactgttcttaccctcgaaccctgatgtggttccattatgtaaatatttcaaatattaaaaatgtatatatttgannnnnnnnantcatattctttcagaatcatgtaaataaatggcatcatgttgtaaaaaannnnnnnanannannanngttaaaaatatgggctgaactttttatggacttgatttttatgactattggtatctaaaggtcaaggaagccatttacattattttggatgaatctactatacatctatggaaatgtctcttttattttaaattctggtttctcaacggaaaatttcagaaaagatgccccttgccattttcgttaatttttcagtcttttcttagacacacccccagcctaagaccttgttcgaggagtttattgtgtctgtcttttcttaacatactgcactgttcttaagcatcatattgtgttgtttttatttagccactattaacatgaaggtttattcaggtagatttgatttcctttgcttcgtttcttctcctgctctgtcaactgtacttatcttaaagggccactctaaaaacaagggagatgtcgtaatctgaaacctttggggagatgtactctgtactgcataacatctccagtgaggtttgtgacaggacctcaactaaatatatgaatttgtgcaagttcatatattaaagtttctgcagcagagtgaaaattgttacagtaaatgtggtagaaactgttaatcgcttaatgccagtttaaatcatgttttgtaaccaagcttcagtaaaaggctttagattgtcanagttggttgatttttagaattgtatatataaagaattagacattaaacaggcatattctagtgtctgaaaatacacataanaaatttctattaaaaaa

SEQ ID NO: 441 - DNA, 1665 bp, Homo sapiens
  modified_base (16)..(26): a, c, g, t, unknown, or other
  modified_base (49)..(50): a, c, g, t, unknown, or other
  modified_base (648)..(648): a, c, g, t, unknown, or other
  modified_base (1488)..(1488): a, c, g, t, unknown, or other
  modified_base (1494)..(1496): a, c, g, t, unknown, or other
  modified_base (1498)..(1498): a, c, g, t, unknown, or other
  modified_base (1507)..(1508): a, c, g, t, unknown, or other
  modified_base (1515)..(1515): a, c, g, t, unknown, or other
  modified_base (1518)..(1518): a, c, g, t, unknown, or other
  modified_base (1525)..(1525): a, c, g, t, unknown, or other
  modified_base (1563)..(1563): a, c, g, t, unknown, or other
  modified_base (1577)..(1578): a, c, g, t, unknown, or other
  modified_base (1619)..(1619): a, c, g, t, unknown, or other
  modified_base (1638)..(1638): a, c, g, t, unknown, or other
ctagttctagatcgcnnnnnnnnnnnttttttttttttttttttttttnnggtttttaaaaggctttattggggaaacgtagaggggtggggaccgtccttggaggcctcaggacaccatcctccatgttgctgggcagttgaagtccccaggggcccctgctcagaagcgtgtcaccagtctctgcgggggcctcatctgtgactcctggaggggcccagcccggggtaaccactacccccccatccctcgttgctgttgctcctgctccaggttccgctgcaggacctgctgctggttggcaatgacacgccggatgccgttgacaaagttgccctggtcatgggggatgaggccaatgaagattttcttctctgaagagtacaggagcataagcacgcggatctcacacgatgctttgtaggaaaagtgcacgcagccggcgaagccattgtccatgatccggcacaggctcttcagtgtctccaggtccttggtgaagtggaactggaccaggcgcgagttccggaacagcggcactagggtggtcagcagctgctgcgggatgagctgcatgtacagcttccttggccactgctcggtcctcaggatctccccctggttcacgtagacgtgggatggcagccnacctcttggaccgactgttgggctcaggcctgggctcctgccactccatgacaccactccatgccagaaacttgttgttgacgatctggactgggcctgagttgacaccaccaggtcccactgcctgcttgcgggtggtgatgacctgccggatggcactgacgaagccgctctggtcgtaggggatgaggcccatgaagatcttcttcttggacgagtacaggagcatgagcacgcgcacctcacagggggagatgtgggggaacagcatgcagcccgcgaagccgttgcccatgatgcggcagagccccttgagcgagtcgcagtctctgttggtgaagtggaactgtgccaactgggagttccggaacagggggcccagggtggtcagcagctgctgagggatcagctgcatgatcagcttctgcggccactggtcggtctccaggttctcgccttggttcacgtaggcttggcagggcagggtccgcttcagctttgcagtggagtcagagtagggtctgcgcttctcctgccactcgaggacgccgctccaagccagcagcttgttgctgagccggtgctcgctcacggccagacccccgagggtgagcccaggtgaggagggaccgatgggacccagtgccccgaagacccgagcaccttccatgggaggggccgagcgggcccggatccgcggaggctgcgggcctcgggggctggcaggccaggagcgcgagcggacggcgcgcaccacgaggggccgcggagggcggccgcgacccccgagggggcccccggcgccggagcggtacggggcacggcgcggacggaccatgncgggcnnngnccgagcggnncgggganctnccgcggnccacaaggggggctgcgggctccaccgactgaggggcncgggcgcgggcgcnnggcttcgggggagacgggctgagccgtaccaagctcggggnacgcgccgccggagtgggntcgccgcggccgaaccactgaggcgag

SEQ ID NO: 442 - DNA, 6750 bp, Homo sapiens
  modified_base (28)..(28): a, c, g, t, unknown, or other
  modified_base (72)..(72): a, c, g, t, unknown, or other
  modified_base (117)..(117): a, c, g, t, unknown, or other
  modified_base (129)..(129): a, c, g, t, unknown, or other
  modified_base (137)..(137): a, c, g, t, unknown, or other
  modified_base (142)..(142): a, c, g, t, unknown, or other
  modified_base (216)..(226): a, c, g, t, unknown, or other
  modified_base (377)..(377): a, c, g, t, unknown, or other
  modified_base (656)..(656): a, c, g, t, unknown, or other
  modified_base (2264)..(2264): a, c, g, t, unknown, or other
  modified_base (2545)..(2545): a, c, g, t, unknown, or other
  modified_base (2802)..(2802): a, c, g, t, unknown, or other
  modified_base (2844)..(2844): a, c, g, t, unknown, or other
  modified_base (4723)..(4723): a, c, g, t, unknown, or other
  modified_base (4882)..(4882): a, c, g, t, unknown, or other
  modified_base (5620)..(5620): a, c, g, t, unknown, or other
  modified_base (5957)..(5957): a, c, g, t, unknown, or other
  modified_base (6611)..(6611): a, c, g, t, unknown, or other
  modified_base (6615)..(6615): a, c, g, t, unknown, or other
  modified_base (6625)..(6628): a, c, g, t, unknown, or other
acacgcgcttcaacttcggttggtgtgngtcgaagaaacctgactgcgccctgaggagaacagcggagaagngtccaccgagcctggcgaaaggtccgctgagcgggctgtcgtccnggagccactccngggctgcnggagnacccagtggagaccgcgcctggctcaggtgtgggaccccatccttcctgtcttcgcagaggagtcctcgcgtgnnnnnnnnnnnaaataagcgggttttgaaaacaaaaaaaagaaggagtggaagagggggccaggatccaggcctccatccccacagaagtgaagctacagctgggaggtctcctcccaccccaaccgtcaccctgggtcccgactgcccacctcctcctccnccccctccccccaacaacaacaacaacaacaactccaagcacaccggccataagagtgcgtgtgtccccaacatgaccgaacgaagaagggacgagctctctgaagagatcaacaacttaagagagaaggtcatgaagcagtcggaggagaacaacaacctgcagagccaggtgcagaagctcacagaggagaacaccacccttcgagagcaagtggaacccacccctgaggatgaggatgatgacatcgagctccgcggtgctgcagcagctgctgcncccaccccctccaatagaggaagagtgcccagaagacctcccagagaagttcgatggcaacccagacatgctggctcctttcatggcccagtgccagatcttcatggaaaagagcaccagggatttctcagttgatcgtgtccgtgtctgcttcgtgacaagcatgatgaccggccgtgctgcccgttgggcctcagcaaagctggagcgctcccactacctgatgcacaactacccagctttcatgatggaaatgaagcatgtctttgaagaccctcagaggcgagaggttgccaaacgcaagatcagacgcctgcgccaaggcatggggtctgtcatcgactactccaatgctttccagatgattgcccaggacctggattggaacgagcctgcgctgattgaccagtaccacgagggcctcagcgaccacattcaggaggagctctcccacctcgaggtcgccaagtcgctgtctgctctgattgggcagtgcattcacattgagagaaggctggccagggctgctgcagctcgcaagccacgctcgccaccccgggcgctggtgttgcctcacattgcaagccaccaccaggtagatccaaccgagccggtgggaggtgcccgcatgcgcctgacgcaggaagaaaaagaaagacgcagaaagctgaacctgtgcctctactgtggaacaggaggtcactacgctgacaattgtcctgccaaggcctcaaagtcttcgccggcgggaaactccccggccccgctgtagagggaccttcagcgaccgggccagaaataataaggtccccacaagatgatgcctcatctccacacttgcaagtgatgctccagattcatcttccgggcagacacaccctgttcgtccgagccatgatcgattctggtgcttctggcaacttcattgatcacgaatatgttgctcaaaatggaattcctctaagaatcaaggactggccaatacttgtggaagcaattgatgggcgccccatagcatcgggcccagttgtccacgaaactcacgacctgatagttgacctgggagatcaccgagaggtgctgtcatttgatgtgactcagtctccattcttccctgtcgtcctaggggttcgctggctgagcacacatgatcccaatatcacatggagcactcgatctatcgtctttgattctgaatactgccgctaccactgccggatgtattctccaataccaccatcgctcccaccaccagcaccacaaccgccactctattatccagtagatggatacagagtttaccaaccagtgaggtattactatgtccagaatgtgtacactccagtagatgagcacgtctacccagatcaccgcctggttgaccctcacatagaaatgatacctggagcacacagtattcccagtggacatgtgtattcactgtccgaacctgaaatggcagctcttcgagattttgtggcaagaaatgtaaaagatgggctaattactccaacgattgcacctaatggagcccaagttctccaggtgaagagggggtggaaactgcaagtttcttatgattgccgagctccaaacaattttactatncagaatcagtatcctcgcctatctattccaaatttagaagaccaagcacacctggcaacgtacactgaattcgtacctcaaatacctggataccaaacataccccacatatgccgcgtacccgacctacccagtaggattcgcctggtacccagtgggacgagacggacaaggaagatcactatatgtacctgtgatgatcacttggaatccacactggtaccgccagcctccggtaccacagtacccgccgccacagccgccgcctccaccaccaccacngccgccgcctccatcttacagtaccctgtaaatacctgtcatgtccttcaggatctctgccctcaaaatttattcctgttcagcttctcaatcagtgactgtgtgctaaattttaggctactgtatcttcaggccacctgaggcacatcctctctgaaacggctatggaaggttagggccactctggactggcacacatcctaaagcaccaaaagaccttcaacattttctgagagcaacagagtatttgccaatanatgatctctcatttttccaccttgactgccaatctaactaanataattaataagtttactttccagccagtcctggaagtctgggttttacctgccaaaacctccatcaccatctaaattataggctgccaaatttgctgtttaacatttacagagaagctgatacaaacgcaggaaatgctgatttctttatggagggggagacgaggaggaggaggacatgacttttcttgcggtttcggtaccctctttttaaatcactggaggactgaggccttattaaggaagccaaaattatcggtgcagtgtggaaaggcttccgtgatcctctcgctgcacccttagaaacttcaccgtcttcaaactccatttccatggttctgttaattctcaaggagcagcaactcgactggttctcccaggagcaggaaaaacccttgtgacatgaaacatctcaggcctgaaaagaaagtgctctctcagatggactcttgcatgttaagactatgtcttcacatcatggtgcaaatcacatgtacccaatgactccggctttgacacaacaccttaccatcatcatgccatgatggcttccacaaagcattaaacctggtaaccagagattactggtggctccagcgttgttagatgttcatgaaatgtgaccacctctcaatcacctttgagggctaaagagtagcacatcaaaaggactccaaaatcccatacccaactcttaagagatttgtcctggtacttcagaaagaattttcatgagtgttcttaattggctggaaaagcaccagctgacgttttggaagaatctatccatgtgtctgcctccatatgcatctgggcatttcatcttcagtcccctcattagactgtagcattaggatgtgtggagagaggagaaatgatttagcacccagattcacactcctatgcctggaagggggacatctttgaagaagaggaattagggctgtggacactgtcttgaggatgtggacttccttagtgagctccacattacttgatggtaaccacttcaaaaggatcagaatccacgtaatgaaaaaggtccctctagaggatggagctgatgtgaagctgccaatggatgaaaagcctcagaaagcaactcaaaggactcaaagcaacggacaacacaagagttgtcttcagcccagtgacacctctgatgtcccctggaagctttgtgctaacctgggactgcctgacttcctttagcctggtcccttgctactaccttgaactgttttatctaacctctctttttctgtttaattctttgctactgccattgaccctgctgcaggatttgtgtcattttcctgcctggttgctgagactccattttgctgccacacacagagatgtaagaggcaggctttaattgccaaagcacagtttgagcagtagaaaacaacatggtgtatatctcaaattgcctgacatgaagaggagtctaacggtgaagtttcacttttcatcagcatcatctttcacatgttcattatcatccgctcttattcttgcatgtttaaacacttaaaatttttagtataatttttagtgtgttttgaagtggtgactaggctttcaaaaacttccattgaattacaaagcactatccagttcttattgttaaactaagtaaaaatgataagtaacatagtgtaaaatattcctttactgtgaacttcttacaatgctgtgaatgagaggctcctcagaactggagcatttgtataataattcatcctgttcatcttcaattttaacatcatatataatttcaattctatcaattgggcctttaaaaatcatataaaaggatataaaatttgaaaagagaaacctaattggctatttaatccaaaacaacttttttttnccttcaatggaatcagaaagcttgtcaatcactcatgtgttttagagtaattacttttaaaatggtgcatttgtgcttctgaactattttgaagagtcacttctgtttacctcaagtatcaattcatcctccatacatttgaattcaagttgttttttngtcaaatttacagttgtcaattgatcttcaagctgcagggtgcctagaaatgggccgttgtctgtagccctggcatgtgcacacggacatttgccaccactgcaagcaaaagtctggagaagttcaccaacgacaagaacgattagggaaaatatgctgctgtgggttaacaactcagaaagtccctgatccacatttggctgtttactaaagcttgtgattaactttttggcagtgtgtactatgctctattgctatatatgctatctataaatgtagatgttaaggataagtaattctaaatttattattctatagttttgaagtttggttaagtttcctttcactcaattgatttattttgttgttaatcaaatttatgttaattggatcctttaaattttttttggcattttccaacaaaaatggctttattcataagaaaggaaaaaaatcaatggaatttgatatctaaagaagttagaaagggagcaaaataaaaaacataaaggagatagatgaattagtaagcaaatcagtagtcgagtttttcaaactggcaaaattaattaattgacttttagcccaaatttacattgttaattaaatcaagaaggaagaagatctaagagctcccattgataggcaagcctagagagaactagctaaatttatcatgctaggatattgaaacacagaaagtttacatacatttatgaagggtcaatttagtttggnacagtgaggtatttgtcttagtggaaaaaaggagaattagtctgatcaaatcgtgaagtaatacagtgaacttgcaggtgcacaaaataagagggccacatctatatggtgcagtctggaattctgtttaagtttgtaggtacctcttggacttctgaattgatccagttgtcatccaccacagacatctcacatcagatacagacagttccaagattgacaacagagaacaacctgctggaaagacctgggcagaaatggagagccctgcgggaaccatgctacattttcatctaaagagagaatgcacatctgatgagactgaaagttctttgtngttttagattgtagaatggtattgaattggtctgtggaaaattgcattgcttttatttctttgtgtaatcaagtttaagtaataggggatatataatcataagcattttagggtgggagggactattaagtaattttaagtgggtggggttatttagaatgttagaataatattatgtattagatatcgctataagtggacatgcgtacttacttgtaaccctttaccctataattgctatccttaaagatttcaaataaactcggagggaactgcagggagaccaacttatttagagcgaattggacatggataaaaaccccagtgggagaaagttcaaaggtgattagattaataatttaatagaggatgagtgacctctgataaattactgctagaatgaacttgtcaatgatggatggtaaattttcatggaagttataaaagtgataaataaaaacccttgcttttacccctgtcagtagccctcctcctaccactgaaccccattgcccctacccctccttctaactttattgctgtattctcttcactctatatttctctctatttgctaatattgcattgctgttacaataaaaattcaataaagatttagtggttaagtgcaaaaaaaaaaaaaaaaaaaaaaanaaanaaaaaaaaannnnagggggggcccggtacccaattcgccctatagtgagtcgtattacaattcactggcccgcgttttacaacgtcgggactgggaaaaccttggcgttacccaacttaatcgccttgcagaata

SEQ ID NO: 443 - DNA, 8288 bp, Homo sapiens
  modified_base (332)..(332): a, c, g, t, unknown, or other
  modified_base (347)..(348): a, c, g, t, unknown, or other
  modified_base (350)..(352): a, c, g, t, unknown, or other
  modified_base (563)..(564): a, c, g, t, unknown, or other
  modified_base (1111)..(1112): a, c, g, t, unknown, or other
  modified_base (1219)..(1219): a, c, g, t, unknown, or other
  modified_base (1226)..(1226): a, c, g, t, unknown, or other
  modified_base (1233)..(1233): a, c, g, t, unknown, or other
  modified_base (1235)..(1235): a, c, g, t, unknown, or other
  modified_base (1272)..(1273): a, c, g, t, unknown, or other
  modified_base (1863)..(1863): a, c, g, t, unknown, or other
  modified_base (1906)..(1906): a, c, g, t, unknown, or other
  modified_base (1910)..(1910): a, c, g, t, unknown, or other
  modified_base (2144)..(2144): a, c, g, t, unknown, or other
  modified_base (2146)..(2146): a, c, g, t, unknown, or other
  modified_base (2413)..(2413): a, c, g, t, unknown, or other
  modified_base (2486)..(2486): a, c, g, t, unknown, or other
  modified_base (2492)..(2492): a, c, g, t, unknown, or other
  modified_base (2494)..(2494): a, c, g, t, unknown, or other
  modified_base (2511)..(2511): a, c, g, t, unknown, or other
  modified_base (2516)..(2516): a, c, g, t, unknown, or other
  modified_base (2522)..(2522): a, c, g, t, unknown, or other
  modified_base (2539)..(2539): a, c, g, t, unknown, or other
  modified_base (2544)..(2544): a, c, g, t, unknown, or other
  modified_base (2555)..(2555): a, c, g, t, unknown, or other
  modified_base (2560)..(2560): a, c, g, t, unknown, or other
  modified_base (2572)..(2572): a, c, g, t, unknown, or other
  modified_base (2596)..(2596): a, c, g, t, unknown, or other
  modified_base (3848)..(3849): a, c, g, t, unknown, or other
  modified_base (3853)..(3853): a, c, g, t, unknown, or other
  modified_base (3857)..(3857): a, c, g, t, unknown, or other
  modified_base (3868)..(3869): a, c, g, t, unknown, or other
  modified_base (3877)..(3877): a, c, g, t, unknown, or other
  modified_base (3913)..(3913): a, c, g, t, unknown, or other
  modified_base (3920)..(3920): a, c, g, t, unknown, or other
  modified_base (4493)..(4493): a, c, g, t, unknown, or other
  modified_base (4508)..(4508): a, c, g, t, unknown, or other
  modified_base (4510)..(4510): a, c, g, t, unknown, or other
  modified_base (4512)..(4514): a, c, g, t, unknown, or other
  modified_base (5665)..(5665): a, c, g, t, unknown, or other
  modified_base (7579)..(7579): a, c, g, t, unknown, or other
  modified_base (7653)..(7653): a, c, g, t, unknown, or other
  modified_base (8106)..(8106): a, c, g, t, unknown, or other
  modified_base (8223)..(8223): a, c, g, t, unknown, or other
  modified_base (8225)..(8225): a, c, g, t, unknown, or other
ttacaatcgaagcaagcgacaaggagacatctggaacaaacgggtggaagtgcagtgccttgctcttgctggaggtgctgggtggctcccacaagcacgccgtggatggtgctgtgaaggaaactcacgaagctgtggaaagagaaccccgggctggtggaacagtacttgtcagccattctcagcctagagcccaaccagaactatgctggcatgctggggctgctggtgcagttctgcacgagtcacaaggagatggacgtggtcagtcagcacaagagcgccctactggacttttacatgaagaacatcctgatgagcaaagtcaagcntccgaagtacctgtnngnnngctgtgcccctctgctccgatacctgtcccactcagaatttaaggatctgatactgcccaccatacagaagtccttactgaggagtccagagaatgttattgaaactatttctagtctgctggcatcagtgacgcttgacctcagccagtatgccatggacatcgtgaaaggactggctggtcacctgaaatccaacagtccccgcctganngatgaagctgtgctggcactgcggaacctggcacgccagtgcagtgactcttcggccatggaatccctgaccaagcacctatttgctatcctcggaggctcggaaggaaaactaactgttgtagcccagaagatgagcgtcctctcagggattgggagcgtcagtcatcacgtggtgtctggaccttccagtcaggtcctgaatgggatcgtggctgagctgttcatcccgttccttcagcaggaagttcatgaagggaccttggtacacgctgtctcagtcctggctctctggtgtaaccgattcactatggaagtgcccaagaagctcactgaatggttcaaaaaagctttcagccttaaaacctccacatctgcggtgaggcatgcctacctgcagtgcatgttggcctcttaccggggtgacacgctgttgcaggccctggacttactgcccttgctcatccagacagtggagaaggcagcctcccaaagcactcaggttcccaccatcaccgaaggggttgccgcagccttgttgctcttanngttgtcagtggctgactcacaggctgaggccaaactgagcagtttctggcagttgattgtggatgagaaaaagcaggttttcacttctgagaaattcctggtcatgncttcagnaggatgncnctgtgtactgtgttgcatctgacagagagacttttcnntgaccacccgcatagactcactggcaacaaagttcagcagtaccaccgggctctggtggcggtgctcctgagccgcacctggcacgtccgcaggcaggctcagcagacagttcggaagctgctgtcctctcttgggggctttaagctggcgcacggactcttggaggagctgaagactgtcctcagttctcacaaggtgctgcccttagaggctttggtgactgatgctggagaggtgactgaggcaggcaaggcctacgtgcctccacgggtcctgcaggaggctctgtgtgtcatctccggtgtgccagggctcaagggtgatgtcaccgacactgaacaactggcccaggaaatgctgatcatctcccaccacccatccttagttgccgtgcagtctggactttggccagcacttcttgccaggatgaagatcgatcctgaagcctttatcaccaggcacctggatcagatcattcccaggatgaccacacagagtcccctaaaccagtcctccatgaatgccatgggctccctttccgtcctgtcgccggaccgggtcctcccacagctcatcagcaccatcactncctccgtgcagaaccctgcactgcgcctggtgacgcgggaggngttngccattatgcagacccctgctggggagctgtatgacaaatccatcattcagagtgcccagcaggacagcataaaaaaggccaacatgaagcgagagaacaaagcttattccttcaaagagcagatcatcgagctggagctgaaggaggagataaagaagaagaaaggcatcaaagaggaggtgcagctgaccagcaagcagaaggagatgctgcaggcccagctagacagggangngcaggtccggaggcggctgcaggagctggatggggagctggaggcggcgcttggactgctggacatcatcctggccaagaacccgtccggcctgacccagtacatccctgttttggtcgactcttttctgcccttgctgaagtctcccctggctgctcccaggatcaagaaccccttcttgtccttggctgcctgtgtcatgccctctaggctcaaggctttgggcactttggtgagccacgtgaccctgcgcctgctgaagccagnagtgtgtcctggataagtcctggtgccaggaagagctgtcggtggctgtgaagagggcggtgatgctgctgcncacccnanaccatcaccagcagggngggcnaggggnagccaggtgctgcgccnttgtnccgcgccagcnttctncttagtcttccngtttctgaagatggtgctgacggngatgccccaccacagtgaggaggaggaggagtggatggcccagattcttcagatcctcactgtccaagcccagctgagggcctcccccaacaccccacccgggcgggtggacgagaatggcccggagttgctgcctcgcgtggccatgctgcgtcttctgacttgggtgatcgggacgggctcgcctcgcttacaggttctggcttcagacaccctgaccaccctgtgtgccagcagcagtggtgatgatggctgtgcctttgcagagcaggaggaggtggacgtgctgctctgtgccttgcagtccccgtgtgccagcgtgcgggaaaccgtgctccgggggctgatggaactccacatggtattgccagcacctgatactgatgagaagaatggcctgaaccttctgcggagactctgggtggtcaagtttgacaaggaggaggagatccggaagctggctgagaggctctggtcaatgatgggcctagacctgcagccagacctctgctccttgctgattgacgacgtgatctatcatgaggcggctgtaaggcaggcaggggccgaagccctctcccaagcagtggcacgttaccagcggcaggcggcggaggttatgggcaggctcatggagatttaccaggaaaagctctaccggccgcccccagtgctggatgctttgggacgagttatttcagaatctcctccagatcagtgggaagccaggtgtggcttggcgttggccctcaacaagctctcccagtatttggacagctctcaggtgaagccactctttcagttttttgtccctgatgccctcaatgaccgacacccagatgtccggaagtgcatgttggatgcagccctcgcaacgctcaacactcatgggaaggagaacgtcaactcgctgttgccagtattcgaggagttcctgaagaacgcgcccaatgatgccagctatgatgctgtgcgacagagtgtggtggtcctgatgggctctctggccaagcacctggacaagagtgaccccaaagtgaagcccattgttgccaagctcatcgctgccctctccaccccctcccagcaggtccaggagtccgtagccagctgcttgccacccctcgtgccagccatcaaggaggatgctggagggatgatccagaggcttatgcagcagctgctggagtcagacaagtacgcagagcgcaaaggggccgcctatggcctggcgggcctggtgaagggcctnngcancctntcgctgaagcnncaggagangatggcggcactgactgatgccatccaagataagangaacttncgccggcgagagggagccctctttgccttcgagatgctctgcaccatgctggggaaactttttgagccgtatgtggttcacgtgctgccccatctgctcctgtgctttggggatggaaaccagtatgtgcgtgaggctgcagatgactgtgccaaggctgtgatgagcaacttgagtgctcacggggtgaagctggtgctcccctccttactggctgccctggaggaggaatcgtggcggaccaaagctgggtcagtggagcttcttggggcaatggcgtactgtgctcctaagcagctgtcatcctgtctacccaacattgtgcccaagcttacggaggtgctgaccgactcccatgtcaaagtccagaaggctggacagcaggcgctcaggcagatcggctccgttatcaggaacccggagatcctggccattgctccagtcctcctggatgccctgacggatccctccaggaagacccagaagtgcttgcagaccctgctggacaccaagtttgtccacttcattgatgccccatccctggccctcatcatgcccattgtccagagagcnttccaggaccgttcnangnnnacgcggaagatggcagcccagattattggcaacatgtactccctgacagaccagaaggacttggctccgtacctgcccagcgtgacgcctggcctgaaagcatcgcttttggaccctgtgcctgaggtgcggaccgtatctgcaaaggcccttggggccatggtgaagggcatgggggagtcgtgctttgaggacttgctgccgtggctgatggagacactgacctatgagcagagctctgtggatcgctcaggcgctgcacaggggttggctgaggtcatggccggtttgggggtggagaagttggagaagttgatgccagaaatcgtggctacagccagcaaagtggacattgcaccccatgtccgagatggctacattatgatgtttaactacctgcccatcacctttggagacaagtttactccttatgtggggcccatcatcccctgtatcctcaaagctcttgctgatgagaatgagtttgtgcgtgacaccgccctgcgcgcgggccagcgggttatctccatgtacgctgagacagccatcgccctgctgctgccccagctagagcaaggcctctttgatgacctttggagaatcaggttcagctctgttcagctccttggggatctcctgtttcacatctcaggagtcactgggaagatgaccacagaaactgcctctgaggatgataactttggaactgcccagtccaacaaggcgatcatcactgccctgggggtagagcggcggaaccgggtgttggcagggctgtacatgggccgctcagacacccagctggtggtgcggcaggcgtccctgcatgtctggaagattgttgtctccaataccccccgcaccttgcgtgagatcctacccactctctttgggctcctgctgggtttcctggccagcacgtgtgcagataagagaacgattgcagcgagaacattgggagatcttgtgcggaagttaggggagaaaatcctccccgagatcatccccatccttgaggaaggcctgaggtctcagaagagcgatgagaggcagggtgtgtgcattggcctaagtgagatcatgaagtccaccagccgggatgccgtgctgtatttctctgaatccctcgtgcccacggcaaggaaggcttngtgtgacccactggaggaggtcagagaggcggcagccaagactttcgagcagctgcattccaccatcggccaccaggctctggaggacattctcccatttttactaaagcagctggatgacgaggaggtgtcagagtttgccttggatggtctgaagcaagtcatggctattaagagtcgtgtggtgctgccctaccttgtgcccaagctgacaacgccacctgtcaacacccgggtgctggctttcctttcgtcagtggctggtgatgccctcacccgtcatcttggcgtgatcctcccagcggtcatgctggccctgaaggaaaagcttgggaccccagatgagcagctggagatggccaattgtcaggctgtgatcctctccgtagaggatgacacagggcaccggatcatcatcgaggatctgctggaggccacccgcagccctgaggtgggcatgaggcaagctgctgccatcatcctcaacatctactgttcccgctcaaaggctgactacaccagccacctgcggagcctggtctcgggcctgatccgcctcttcaatgactccagccctgtggttctggaggagagctgggatgccctaaatgccatcactaagaagctggatgctggcaaccagttggcactcattgaagagctgcacaaggaaatccggctcatagggaacgagagcaaaggcgagcatgtgccaggattctgcctcccgaagaagggagtgacctccatccttccagtgttgcgggaaggagtcctgactggcagccctgagcagaaggaggaggcagccaaagccttaggcttggtaatccgcctgacctcggctgacgccctgaggccctccgtggtcagcatcactggccctctgatccgcatcctgggggacaggttcagctggaatgtgaaggcggctctgctcgagacactcagcctcttgttggctaaggttgggattgccctgaagcccttcctgccccagctgcagaccactttcaccaaagccctgcaggactccaaccggggggtgcgcctgaaggccgcagatgctctggggaagctcatttccatccacattaaggtggaccccctcttcacagagctgctcaatggcatccgcgccatggaggacccaggtgtcagggacaccatgctgcaggccctgaggtttgtgattcagggagcaggggccaaagtggatgccgtcatccggaaaaacatcgtctcactcctgctgagcatgctgggacacgatgaggacaacactcgcatctcctcagccgggtgcctaggggaactgtgtgcctttttgactgaagaggagcttagtgccgttctacagcagtgcttgctggcggacgtgtccggcattgactggatggttcggcacgggcggagcctggcactttccgtggctgtgaatgtggctcctggcagactttgtgccggcagatatagcagtgatgttcaggaaatgatcctgagcagtgccacggcggacaggatccccattgcggtgagcggggtccggggcatgggctttctcatgagacaccacatcgagacaggcggagggcagttgccggccaaactttccagcctgttcgttaagtgtctgcagaacccatccagcgacatcaggctggtggctgagaagatgatctggtgggcaaataaggacccactgcctcccctggacccccaggccatcaagcccatcctgaaggctcttcttgacaacaccaaggataagaacaccgtggtcagggcctacagcgaccaggcaattgtcaacctcctcaagatgcggcagggtgaagaggtgtttcagtccctctccaagatcctggatgtggccagtttggaggtgctgaacgaggttaaccgaaggtcccntgaagaagctggccagccaggccgactccacggagcaggtggacgacaccatcctgacatgagaggcctgggcnagcagcagcattgccgctccacatctttgctcaatgttttcatttttgaaaatacatttgttccaatggggagcttggaagatggcgttcccagaaagtattttaatatcaatagaccacagccaaagccttaaatcaaacccacacacaactgaaaattgcctcctccatctctcaccttttcctgtggagaagagaaggaaaagcacacgcatgcgcctcagcaaatggcagcccaggagctgtttgtccagtttagcatggctaggtctggaactataatagcagggtcagactgtgggttcctcttctcctgtgcttgagctctggtttgagagctggcgctaccaacctttttcctatatcccgagtggggcacagacggtggatctctgcccagtgtggtgtgtctggcttggcttttcaatattgtgaggtctgaatggatctganccctgtcagatgaaaatgattcacagctctggcagttcccaagtctggggaggggtataggtttgaaaggctgtttgaaagaggaatgtttaataaaggctttgatttaatcttgananaaaaaaaaaaaaaaaaaactcgagggggggcccggtacccaattcgccctatagtgagtcgtt

SEQ ID NO: 444 - DNA, 3576 bp, Homo sapiens
  modified_base (3)..(3): a, c, g, t, unknown, or other
  modified_base (24)..(24): a, c, g, t, unknown, or other
  modified_base (1533)..(1533): a, c, g, t, unknown, or other
  modified_base (1631)..(1631): a, c, g, t, unknown, or other
  modified_base (2679)..(2679): a, c, g, t, unknown, or other
  modified_base (2713)..(2713): a, c, g, t, unknown, or other
  modified_base (3419)..(3419): a, c, g, t, unknown, or other
ttnttttttttttttttttttttnaaaatttgaacaagtatttatttcttaaaatttacttaagggattagagctaatatataatagaacatttaatataacatttggagttatgtcaacataaaaatagctgtggttacaattagcacatgcaattcactgcaaaggtaaaaatacatgctatactctagacaagccttccaaatgaagttagagtagatggggtaaaacagcaagtgaacatgaaaggattgcacttagaagaaagtgggacatagctaggatataaaagaaacatacctaatgctagtcagtcactgcattgtcctactagcaaattgcacatttatttttagagtatattcaatacacatacatattgagactagagaattttcaaatatctacctttgaaatatccctttgtttctaacacatcacattatggtattaatgtaacagcacttaaaacctgtagttatcattcaaagcttgtgttcaagagataaaagaacatcattcagacaaagcctgtgttcaagaaataaaaaaaacatctatcactatcggccttaaatgcatctcatcacacgacccatcaactttaatgaaatgggtaatgaagttaaactaaccagtttgtacaaactattgactgagaaaaagcccttaaaaatttaggaacaaatgagcaacagaagagctcaccctgagctgccaccttttaatttttaatgcaatgtatatgagaatatcatgctaatgcacatactagtagcatgtatgatggaaaaaaataggttaatgcaaaagataatacgcttggctttgtaaagttttgttttgacttacatcatctgaattctgtttatcgagtctgaaaaggaactgctgccaaggaccagtccaaagaagaattaggctgtaagactgctagttcataccttctttgaaatcaatgacaatgtccaattttaggctaatcctaaaacacttgccattttatgactccatattcttttaatttacagaaaagtacaaattttttagaaagtaatcttatcagcacaatataatctaacaatacctgtaatagaaagctatcccagtaaattttttttgaacaattgaacttttgtcttatgcagcttataactttgttattttattcatctcaacaaaataaaactttattgaaacaaaagtgtatggtttaggaatatgctcttaataacaactgagcaaaattagaatgatgtggactataacagaatgaaggaagatctctcctgcttgatgtacttggtcaatatatgttagtaaacagaaatattttagggaattctatgattattctacttctacatttacatgtcatggttttaactagttaaatgggtagaaaaaagacatctttaataattgatttctatttctcaaactagatgctctactttaaatatgagctttaatgaatgttttgtaacattttaaagttgtaacatttctaagtatactccactaacttcacantaagagctagggtcactggatgacttcatgtggtaaaatcccttatcaaggaataaggctgaaatttaaatgaacaattaggtagagaagaggtatgnacacagaacatgtgaatgaaatttgctttttttccttgctgctgttcccgagtgccgactgatccatagtaaaaaaggacaagattaaaattttaggttttaatggtacaaagtgtgaagttttatagttttctaataattattcagtattatccctttcagagatgagggtaggataccacagacatcagtaactgacaagttataatatcaacacatgtaacatttgggtcattattttataaccctaaagggagcaactgcaggtgcagaagcagtgagtgaactagttttgtccagacaaggttttctgatgtgctattactttaaacaccacttttggacactaaagatttaaagtgataaagccactaactaactttattagactagtttttacataaataaccagatttctttgcctacctaaagtacaatttacatgcatcaacacatagattattctaagacatgcttgggaaagtaattttgaatgtaaaaagttttataatttattttctccttagggcaggtgtacattacatattagtgctcaaatatatgttcatttccagaatgaatttttgcacagtaatcatatatccatttaatatgtataaagtgttcttggggatgggggtatattcactcactgtaccatgttttatacaggcttcaacatgcaaatttgtttatatcatggccttcaatgatcctccattctcattcctgtagattaagagttcatattgtatatctgaccctgaaatgtacaaacttcacactacaacattcttcatgacactatttgttatgaggaaagttgcagctaaatattagtcatgtgacttaaattttgagaaaatggaaaatgtaataggtataaatttcctgacacatacagcaagacaaatccagcccagcctttgatgatcaacttaaaagctggagatgtcattatcttgttgtgtaaatttgggtctatccctacctttacttctctgtgcctgattttcctcatctactttgaattcgtcattctattaantctacttttgcctaaagtgggaaactgaatatantcagaatgaaacatctatttttttcataaagaagatcatataatatgtgaaagaactttgaaaggatgaggcattatataaatgcaagaatataaaagataaacaggaagtctaatgtgaacaatattctgagagtaaaaagtgtaattatatttccattgtaaatgtataccaagttttcttagctttctattctccaataacctctagaaactattctaagcatgcctggtttctgtaacttaaatatggcataaaaacctgtttcctttgaattcacttgatagcagtagtcaatcactaataacgcttgctaatttcctcttactttctaagaaaacccctatatttagcatctgcttccatatcgcacgtggtggttaggggacagcataagtacactagcggctttagcactaaactcgaggcctgggtcacttctcccttgaagaaaaaaggttttaaaaattcctaaatcacaatgtagaactaagttccaccctacctcagaactgcagacattaaaataccatctctttattaagtgtctctacaataatgatatttgctaagaacaagatgtacattttttggggttctgttttgttttggcaaatattgcccaagttgtcttagtgtgcctcaaacatttactaaaaataaaaaaatttaaatctttgcctacttatttaaaaataaaaaaaantactcaaaacaaatttaagctgaagatatatactgtataaagtgttcatctacccagtactctgaagtcttaagaaaagtcaatgatatgtgtgtgtatatgtgtgtgtatatatatatatatatatacacacattagcaatttaagccttttaaca

SEQ ID NO: 445 - DNA, 3576 bp, Homo sapiens; identical to SEQ ID NO: 444
  modified_base (3)..(3): a, c, g, t, unknown, or other
  modified_base (24)..(24): a, c, g, t, unknown, or other
  modified_base (1533)..(1533): a, c, g, t, unknown, or other
  modified_base (1631)..(1631): a, c, g, t, unknown, or other
  modified_base (2679)..(2679): a, c, g, t, unknown, or other
  modified_base (2713)..(2713): a, c, g, t, unknown, or other
  modified_base (3419)..(3419): a, c, g, t, unknown, or other

SEQ ID NO: 446 - DNA, 2911 bp, Homo sapiens
  modified_base (50)..(50): a, c, g, t, unknown, or other
  modified_base (63)..(63): a, c, g, t, unknown, or other
  modified_base (79)..(79): a, c, g, t, unknown, or other
  modified_base (99)..(99): a, c, g, t, unknown, or other
  modified_base (111)..(111): a, c, g, t, unknown, or other
  modified_base (129)..(129): a, c, g, t, unknown, or other
  modified_base (214)..(221): a, c, g, t, unknown, or other
  modified_base (817)..(817): a, c, g, t, unknown, or other
  modified_base (831)..(831): a, c, g, t, unknown, or other
  modified_base (957)..(957): a, c, g, t, unknown, or other
  modified_base (1074)..(1074): a, c, g, t, unknown, or other
  modified_base (1208)..(1208): a, c, g, t, unknown, or other
  modified_base (1227)..(1227): a, c, g, t, unknown, or other
  modified_base (1698)..(1698): a, c, g, t, unknown, or other
  modified_base (1700)..(1700): a, c, g, t, unknown, or other
  modified_base (1765)..(1815): a, c, g, t, unknown, or other
  modified_base (2252)..(2252): a, c, g, t, unknown, or other
  modified_base (2254)..(2254): a, c, g, t, unknown, or other
  modified_base (2264)..(2264): a, c, g, t, unknown, or other
  modified_base (2300)..(2300): a, c, g, t, unknown, or other
  modified_base (2708)..(2708): a, c, g, t, unknown, or other
  modified_base (2715)..(2715): a, c, g, t, unknown, or other
  modified_base (2720)..(2720): a, c, g, t, unknown, or other
  modified_base (2728)..(2728): a, c, g, t, unknown, or other
  modified_base (2738)..(2738): a, c, g, t, unknown, or other
  modified_base (2752)..(2752): a, c, g, t, unknown, or other
  modified_base (2784)..(2784): a, c, g, t, unknown, or other
  modified_base (2828)..(2831): a, c, g, t, unknown, or other
  modified_base (2853)..(2854): a, c, g, t, unknown, or other
  modified_base (2856)..(2861): a, c, g, t, unknown, or other
tttttttttttttttttttttttttttttttttttttttttttttttttntgctatgcaaggntttatttacaacttanatgactctatgattgctcanaatctgacacanactaataagtttcattgnctgaaaatactcataaaatacctcatctccaaaataattcaaatacataattaaatgaacgtttttaaaatgagagttttcagannnnnnnntttttttttttttagtaaatatatgttttatttgtcaagagtaaatgtcagttttatttagaatattcaagtacaaaaaatgaaaatgtatatatctatgactgttaagaaatgttagaaatcattaaaatgttctgagaataccagtaaggcactgaatgcaaataccacctgaaatatgaattatgtgcatttttatatctttaatattcagatgttcatagttattttcttaaaaagtatttttaataaaatgattcaaccttattatttttaccctggaagacagagtttaaacaagtatgtaatgaaaagttttcctaatgaaagctgtgatacactcatgctcaaaggtactttatccttaggaaaaaatagcttatatatctggatgttttaacttttaaagatattttgtttcaccacagtaatacgtcagccataataaggcataataaagcatgaagtcatcatattaaataatctgacacaaaagcttaagatcatatcaccaattgggtaattgtataaaaaatttttaagttctataaaactattaagaggttagagttttagctccataatacatcccaaancatattccccaaantttttagcatatataaaaaaggttcatcttggaatataaatgtaatcagatagccacgatattaatgggttctgtattttcagtggcactgacttcgctctttggtataatgcactgcagtgacantagcttggtagcaagagaaaagatttagattcatcacagaacagcaacttaaacatttctaacaacagtgaatatatatgaatatataggtacaagctgagtatcccttatccaaantgctagggaccagaagtgttttggatttcaggtttggaatatctgcatatacacaacgggacccgactctaattacataattcatgtttcacatccaccttatacatatagcctgaaagtaatttatacaaaanttttgtgcaagaaacaaantctgtttaaactgaaccatcagaaagcaaaggtgtcgggtggggaattttccacttgtggggtcaagtcagtgctcaaaaagattcagattttgaagcttctggatttcagatttttgaattagagatgctcaacttgtagtatcattcactctggcttatgtattgaccttgtacttgaaagtacttttccataaatatcagtaactgtggctgttcaccaaatatagaagtgataaaacaaataacagcaaaatcaaagcacacttctagtttttttttaataaagtttgcttgtgatgatgaccttctgtgctctggaacttctgttttacaaaaaattggagttcttacggtccttgtccttcctcaggttgctgcctgttgccagaaaggactggctgtgaaatatctcggaggtagctttctttttagagaaagcaattatttcttcttccaaaagtcttctctntntcttcaagcttcattctctcttcttggtgaagtctcttaaggtgctcaaatttggcctgtagctnnnnnnnnnnnnnnnnnnnnnnnnnnnnnnnnnnnnnnnnnnnnnnnnnnngactggcttgttttctgggcccacatctgtaaagcccatttcctccagtttgcagcgcctgtaaagctcatagtgcctggtatgggtctgctctcgcaggtcctccatatttgtacaaatgagcatttcccgcagctttacaaagtcacagtggttttcattttccacttgtacaacaccccaagggtactggcgagctttgaccatcttgtttccgacttttacctcatccatacttcccacaacagcaaacggcaactgtccattcattgcagcgttgaccttagcaatagtgtcatcatccgttgggaactggtatatctggacgccattgctgaccaattcactcatgagcttgatcttaaacttctgtaattcagttttagaaaccgtatctgctttggcaatcactggtataatgtttaccttgctgtcangnttcttcatgnttaagagatcaagtgtcttcagagagtggcctgtcngtgaaatgaagtagaggcacacacggatgcgagaatcagggtaggtaaagagagaacgtttaatcttcagttattcttggagacaggcctcaaactgagcatctatgtagtcaactatcggttggtagctctcttctttatttatttggtcaccaaatcccactgtattcacaatggtcaatttcaatcgaacattactttcctggagttcatatgtctgaactttaagtttaacatttgggcaaaatgtgaggattcatagtcttccaattagtattaaacatgtgtcaatcagtgttgattttccattccagtttcccccacacagaatattaaagcagaaaccttgctgaacggatctgttcaccagctgatcaggcaaattctcaaaccaacatggccagacanagtcaangaacngaatgttntctctttttntctgttcatcatcngatccttgtgaagacatacaagttgttttcgntgccatgtgagactgaaagagcaggtgccgcgccacctcggagnnnnccatggtcgcgggcaggggcanngnnnnnngcggctgtatcaggcccggccccgagcggctggtcccggcgacggcggcg

SEQ ID NO: 447 - DNA, 2762 bp, Homo sapiens
  modified_base (89)..(90): a, c, g, t, unknown, or other
  modified_base (459)..(459): a, c, g, t, unknown, or other
  modified_base (488)..(488): a, c, g, t, unknown, or other
  modified_base (508)..(508): a, c, g, t, unknown, or other
  modified_base (631)..(631): a, c, g, t, unknown, or other
  modified_base (670)..(670): a, c, g, t, unknown, or other
  modified_base (782)..(782): a, c, g, t, unknown, or other
  modified_base (867)..(867): a, c, g, t, unknown, or other
  modified_base (923)..(923): a, c, g, t, unknown, or other
  modified_base (942)..(942): a, c, g, t, unknown, or other
  modified_base (981)..(981): a, c, g, t, unknown, or other
  modified_base (988)..(988): a, c, g, t, unknown, or other
  modified_base (993)..(993): a, c, g, t, unknown, or other
  modified_base (1010)..(1010): a, c, g, t, unknown, or other
  modified_base (1078)..(1078): a, c, g, t, unknown, or other
  modified_base (1883)..(1883): a, c, g, t, unknown, or other
  modified_base (1896)..(1896): a, c, g, t, unknown, or other
  modified_base (2049)..(2049): a, c, g, t, unknown, or other
  modified_base (2545)..(2545): a, c, g, t, unknown, or other
  modified_base (2651)..(2652): a, c, g, t, unknown, or other
  modified_base (2697)..(2697): a, c, g, t, unknown, or other
  modified_base (2700)..(2700): a, c, g, t, unknown, or other
  modified_base (2702)..(2702): a, c, g, t, unknown, or other
  modified_base (2704)..(2704): a, c, g, t, unknown, or other
ggtgggtgcctgccagcagctgaggcgccatggcggcggcagcggtgtcagagtcttggccggagctggagctggctgagcgcgagcgnncggcgggagctgctgctgacggggcccgggctggaggagcgagtgcgggcggcgggtgggcagctgccgccgcggcttttcaccctgccgctgctgcactacttggaagtgagcggctgcgggagcttgcgcgcgccggggcctggcctggcgcagggcctgccgcagctgcacagcctcgtgctgcggcgcaacgcgctggggcccggcctgagccccgagctcgggccgctgcctgcccttcgggtgctcgacctgtcgggcaacgcgctggaggcgctgccgccgggccaaggcctgggccccgccgagccgccgggccttccgcagctgcagagcctcaacctcagcggcaaccggctgcgcganctgccagccgacctggcgcgctgcgcccngcgcctgcagagcctcaacntcaccggcaattgcctagactcctttcccgccgagctctttcgccccggcgcgctgcccctgctcagtgaactggcggctgctgacaactgcctccgagaactcagccccgacatcgcccacntggcctcgctcaagacgttggacctctcgaacaaccagntgagcgagatccctgcagagcttgcggactgccccaagctcaaggagatcaatttccgtgggaacaagctgagggacaagcgcctggagaagatggtcagcggctgccagancagatccatcctggagtacctgcgcgtcggaggccgtggtggcgggaagggcaagggccgtgccgagggctcggagaaggaaganagccggaggaagaggagggagaggaagcagaggcgggaaggtggtgatggggaggngcaggacgtgggagatgcnggccggctgctgctcagggtcctgcacgtctctgaaaancccgtanctctngacagtcagagtgagcnccgaggtccgggatgtgcggccctacattgtgggggccgtggtgcgaggcatggacctgcagccaggnaatgcactcaagcgcttcctcacctcgcagaccaagctccacgaagatctctgtgagaagaggacggctgccacccttgccacccacgagctccgtgccgtcaaagggcccctgctgtactgcgcccggcccccacaggacctcaagattgtccccttggggcggaaagaagccaaggccaaggagctggtgcggcagctgcagctggaggccgaggagcagaggaagcagaagaagcggcagagtgtgtcgggcctgcacagataccttcacttgctggatggaaatgaaaattacccgtgtcttgtggatgcagacggtgatgtgatttccttcccaccaataaccaacagtgagaagacaaaggttaagaaaacgacttctgatttgtttttggaagtaacaagtgccaccagtctgcagatttgcaaggatgtcatggatgccctcattctgaaaatggcagaaatgaaaaagtacactttagaaaataaagaggaaggatcactctcagatactgaagccgatgcagtctctggacaacttccagatcccacaacgaatcccagtgctggaaaggacgggccctcccttctggtggtggagcaggtccgggtggtggatctggaagggagcctgaaggtggtgtacccgtccaaggccgacctggccactgcccctccccacgtgactgtcgtgcgctgacgccagggccgcctgtccgcgtttgtttggccggttttgcggaggtttctatgcggcaatgctgaattatccgttagattttcaccccagtttttttgtnggttttttttttngagatggagtctcgctctgtcgccaggctggagtgcagtggcgtgatctcgagtcactgcagcctgtgtctcctgggttcaagcgattctcctgcctcagcctcccaagtagctgggactacaggtgtgtgccactaagctcagctaattttngtatttttagtagagacggggtttcaccattttgaccaggatggtcttgatctcttgacctcatgatctgtccacctctgcccctcaaagtgctgggattacgtgatccacccgcctcagcctcccaaagtgctgggattacaggcgtgagctgtgcctggcccaccccagcattttttaagatgtatgtattcgttgttctgtttttccagatgattctgtcgtaaagtgatgctatgttgtcgttacaacatcaaagtgattttacggtttttgatgggattattcaagtgtcagaattaactgttcaaaatgttctgaatcatgtagatacatggcaggtaactgtttatgggagaaaagtacagtgctgttacgtggcactgtacagtcatgtgccacgtaacagcgtctgggtcagtgacggacacttacctgacagcggatccacaatattctcgtgcagtgtgtttggaatcctggtctgggctctcgncgttggccttgtagatcaagtaggggaagtgagtgatgttcagtcatgctgctgggacacttggttttccagatgaaaacacataaataaaactacatgcaccatnnaaaaaaaaaaaaaaaaaaaaaaaaaaaaaaaaaaaaaaaaaaaanagngngngagagaagaaaaaaaaaaaaaaaaaaagaggaaaaaaaaaaaaagaaaaaaaaaaaaa

SEQ ID NO: 448 - DNA, 1632 bp, Homo sapiens
  modified_base (6)..(11): a, c, g, t, unknown, or other
  modified_base (13)..(15): a, c, g, t, unknown, or other
  modified_base (51)..(51): a, c, g, t, unknown, or other
  modified_base (731)..(731): a, c, g, t, unknown, or other
  modified_base (1600)..(1602): a, c, g, t, unknown, or other
gaccannnnnncnnnggggctggcgggcggcggggtccgcggggccgcagnagatgacggccggcggcaggccgaggccgagggcgctggcggggagcccggcgcggcgcggctgccctcgcgggtggcccggctgctgtcggcgctcttctacgggacctgctccttcctcatcgtgcttgtcaacaaggcgctgctgaccacctacggtttcccgtcaccaattttccttggaattggacagatggcagccaccataatgatactatatgtgtccaagctaaacaaaatcattcacttccctgattttgataagaaaattcctgtaaagctgtttcctctgcctctcctctacgttggaaaccacataagtggattatcaagcacaagtaaattaagcctaccgatgttcaccgtgctcaggaaattcaccattccacttaccttacttctggaaaccatcatacttgggaagcagtattcactcaacatcatcctcagtgtctttgccattattctcggggctttcatagcagctgggtctgaccttgcttttaacttagaaggctatatttttgtattcctgaatgatatcttcacagcagcaaatggagtttataccaaacagaaaatggacccaaaggagctagggaaatacggagtacttttctacaatgcctgcttcatgattatcccaactcttattattagtgtctccactggagacctgncaacaggctactgaattcaaccaatggaagaatgttgtgtttatcctacagtttcttctttcctgttttttggggtttctgctgatgtactccacggttctgtgcagctattacaattcagccctgacgacagcagtggttggagccatcaagaatgtatccgttgcctacattgggatattaatcggtggagactacattttctctttgttaaactttgtagggttaaatatttgcatggcagggggcttgagatattcctttttaacactgagcagccagttaaaacctaaacctgtgggtgaagaaaacatctgtttggatttgaagagctaaagagtctgcagcaggattggagactgacttgtgactgcgggctgggggggcattcccagtaggaatgtgaagccagaggtttcggattcgtgacatccaccccctgggcaagtgagagcatctgcaaaatgcaaagagaactacctcatatgcaggatgagccaatggcagtctcaagaaatgtactcgggcgacaccttacctgtggaaagcaaatcttttcaaaataagccactgggactcggtaggtggagccccagctgctcttctagggacctatggggccttcgtggcatctctgtgctgtgtgctggggaggaggttgatgtaatggtgactcttttctgatcagcaccttggccgtgattcccaaggtcccagccaaagcaaagggccagttgtttcagtttaaacagacatgtctttagtctaataaaattagttaactgccagtaaagttatttgttagctttgatgaaagctatgttggtatctttccctaatcatcaaagtaaataaaaaatcatttctannnaaaaaaaaaaaaaaaaaaagggcggccgct

SEQ ID NO: 449 - DNA, 1829 bp, Homo sapiens
  modified_base (94)..(94): a, c, g, t, unknown, or other
  modified_base (161)..(161): a, c, g, t, unknown, or other
  modified_base (221)..(227): a, c, g, t, unknown, or other
  modified_base (962)..(962): a, c, g, t, unknown, or other
  modified_base (970)..(970): a, c, g, t, unknown, or other
  modified_base (981)..(981): a, c, g, t, unknown, or other
  modified_base (1006)..(1006): a, c, g, t, unknown, or other
  modified_base (1027)..(1027): a, c, g, t, unknown, or other
  modified_base (1077)..(1079): a, c, g, t, unknown, or other
  modified_base (1081)..(1082): a, c, g, t, unknown, or other
  modified_base (1086)..(1097): a, c, g, t, unknown, or other
  modified_base (1104)..(1105): a, c, g, t, unknown, or other
  modified_base (1108)..(1108): a, c, g, t, unknown, or other
  modified_base (1613)..(1613): a, c, g, t, unknown, or other
  modified_base (1761)..(1761): a, c, g, t, unknown, or other
ttaaatgctctttgccagatattctcctgcagctctaaggaaaggaaatcaatttaaaaataatttgtagaatctactattgagccaccaaagnataattccctaaaagtttaagaaaccctggcaattaattcagcataaacatatcctataaacagcangagaggttcagctttctgattttactgtggaccttttcctaagggcattcatgaatgcannnnnnnttttaactatggcttacatttattttaaatttcactaaatacaaatcttgattgtcatgccagttttagatcttattaattttcagaatggataaattcaaataatcataaattacggtaactttttattataccaaggtgttctaatgccatcatatgaagacagatgcttcaaacaacctgcattaaattatatttttaataaaattaaaatctatttttaacctatttgtagtcacaaaccgaaaacgtgtcgtctttaccttagagctaaaggcttactttatgcatacggtatatttaatagtctacaaatcaaagatttaaacagtcccttaaaaattccatatattctcataccaactcatctacatagaaatgaaaatctctattgttctcacaaaccattaccatgagttcactataacaactggatcaatatggcttgcctttcaaagttaaagaatcagaaaggggcctgtaagaagtcatttagcccaattccctcaccctgtgtgttttccctcaaagccagtgcaatttttttttaaccaaaaaactggacatgtttaatacatacagtttgacaaatttggatttcactctttgttttgatgtagtaactcttttataaaagggaacagattcagacaagctcagtggcccaactgaagacattcagcaattaatggcaggacttcagtaatcagtggcaggactacaacatacatctcnttcatgcntagggaaaccnaggctctctattataaagctgaccnagggctattgttttccccttntctctcatcctaaacaccattcatatttttcctaggtcacattttagtgnnntnntttnnnnnnnnnnnnttttttnnttntcatgttttaccttttttattgaattatatacacctcttacaaaaatgcttgaagtaatttaacacctgtacatcagtacaaaacctggctgagtaaaatgaagagaggatctattcaagatcattaagaccaaatgtaaactgggaagtatgtggaagatagctgtccagcaagtgtctggaaggtgttctagctgggtagagagcctattctaacagacacgcacatcgcagaaagcagcatgaacagaaccacatcctagataagagttctgtgtacagaagatccatggaggcaagtgctgtcaggaaggacactgcctccctccaccctcccaaatgtcaccaccaagttccttcaggtgagacctcacacaatgtcaagtgctttctaggaaatactaagatcaggttgagagattctgcttggtctagtcaatctgaaaaattcaggctggaaagacaccttttctcaagagctgaattgacttttgccttcaaatcntgcctgcaccttgcctacgatggcatcaatttacacctaaggacctttgaagagaaaaattccattatttcttttctttcttgagagcagattttttccctcctcctttggaagatttgcagtactttgcttccatctgagccagaanattgtccatttccttttgccgatccttttgtctgctctgtttgagaagttaaaacacaagctttcaaa

SEQ ID NO: 450 - DNA, 1531 bp, Homo sapiens
  modified_base (259)..(259): a, c, g, t, unknown, or other
  modified_base (261)..(261): a, c, g, t, unknown, or other
  modified_base (263)..(263): a, c, g, t, unknown, or other
  modified_base (265)..(278): a, c, g, t, unknown, or other
  modified_base (280)..(280): a, c, g, t, unknown, or other
  modified_base (797)..(797): a, c, g, t, unknown, or other
  modified_base (1155)..(1155): a, c, g, t, unknown, or other
  modified_base (1165)..(1165): a, c, g, t, unknown, or other
  modified_base (1170)..(1170): a, c, g, t, unknown, or other
  modified_base (1184)..(1186): a, c, g, t, unknown, or other
  modified_base (1189)..(1195): a, c, g, t, unknown, or other
  modified_base (1198)..(1200): a, c, g, t, unknown, or other
  modified_base (1220)..(1221): a, c, g, t, unknown, or other
  modified_base (1223)..(1223): a, c, g, t, unknown, or other
  modified_base (1225)..(1226): a, c, g, t, unknown, or other
  modified_base (1228)..(1231): a, c, g, t, unknown, or other
  modified_base (1234)..(1236): a, c, g, t, unknown, or other
  modified_base (1238)..(1241): a, c, g, t, unknown, or other
  modified_base (1243)..(1244): a, c, g, t, unknown, or other
  modified_base (1246)..(1246): a, c, g, t, unknown, or other
  modified_base (1249)..(1249): a, c, g, t, unknown, or other
ttttaagcgacacctttccttttattagattcacaatgcctttgtaactttaaccactcctttgtagaatttttctttgttagaaaacagacaaactctgtccttaggaaccgtcttctacttggtacagcactgcctcagccgcctgcatcgcgtgaccagtaagaatgaagtccagcagcatagagaaaagattcataaaggctgggaggtcatcccccagggcctcccctacttcacatacacagagacgtgtgcntntntnnnnnnnnnnnnnntnttatatatagatatgtatttttttttttttttacaaaaataacagggtttgcacagctctattaattttttaaaattacacaggcaaggtttatgcttcagtataaccatttttactttggatttaagtgggaattttaggcctaaaaataagattaccaagcagaggccatctagccacacagacacaagacatcttgagctccatgaaactagaaatgtggtgatgtcatcctcacacgggggggctacacatccccatcgattattttaactaaaatacaaaagcaaaatagtgtgttaaaataatcctctactcaatgcattagcacatataccaaattatactatctgcatgacagtctctaggtaccaagactgtatttttgcaagtgctattctctacttcattaaatacagtacccagccagcaaccacaaaaagagaacgcatgctgtacagcaagagaaggggagggagacgattttcagggccataacttccatggcaaccaaaanaaaaataagtaagacaaatctcacatgacagatataaaactaatttgcagtgacatttgatatatagttttatcagaagtaatacatttaggttacagttacatgaaaaagagaaactatgtgaaattataggctttctcctagaatatccaaaatgctcatcaacagttaattagtacaagaaagatgaccaccaggtgattgaatagacagaatgtcatgtagtattttaaaaacacagattctgggactagaagctaccaccaaaatatccagaaatctgagttaacaggtcctttattttgcacacttgctgctgatatatagaaccacgaagtgtttgcacagaccacgaatncagccgctancctanaggctggtcacagnnnagnnnnnnntgnnnaccgtcctgccagtgtgagnncngnntnnnngannngnnnntnncnccncggtcggattctggaggagggaggcatcttggcctgcagtaagcggtgctgacgggactctggccacagaggtcaggcctcctgaaaacagcactgccttccgcgctgccccagcttgccccattccttgtccgccaacccaccgtgattcatcttctgaagctgggagtgaaactgggtcagctgtaacctgttcctattcatctggaaggagggaggcttggatgagcaggggatgagagctgcagggaaataaatgagatattcgtccttaaaaaaaag

SEQ ID NO: 451 - DNA, 1844 bp, Homo sapiens; identical to SEQ ID NO: 203
  modified_base (13)..(15): a, c, g, t, unknown, or other
  modified_base (51)..(51): a, c, g, t, unknown, or other
  modified_base (58)..(58): a, c, g, t, unknown, or other
  modified_base (60)..(61): a, c, g, t, unknown, or other
  modified_base (63)..(63): a, c, g, t, unknown, or other
  modified_base (72)..(74): a, c, g, t, unknown, or other
  modified_base (78)..(78): a, c, g, t, unknown, or other
  modified_base (87)..(90): a, c, g, t, unknown, or other
  modified_base (93)..(93): a, c, g, t, unknown, or other
  modified_base (95)..(95): a, c, g, t, unknown, or other
  modified_base (390)..(390): a, c, g, t, unknown, or other
  modified_base (415)..(415): a, c, g, t, unknown, or other
  modified_base (1024)..(1025): a, c, g, t, unknown, or other
  modified_base (1035)..(1036): a, c, g, t, unknown, or other
  modified_base (1039)..(1039): a, c, g, t, unknown, or other
  modified_base (1048)..(1050): a, c, g, t, unknown, or other
  modified_base (1054)..(1055): a, c, g, t, unknown, or other
  modified_base (1293)..(1293): a, c, g, t, unknown, or other
  modified_base (1320)..(1320): a, c, g, t, unknown, or other
  modified_base (1326)..(1326): a, c, g, t, unknown, or other
  modified_base (1372)..(1372): a, c, g, t, unknown, or other
  modified_base (1380)..(1380): a, c, g, t, unknown, or other
  modified_base (1386)..(1386): a, c, g, t, unknown, or other
  modified_base (1466)..(1466): a, c, g, t, unknown, or other

SEQ ID NO: 452 - DNA, 2093 bp, Homo sapiens
  modified_base (42)..(42): a, c, g, t, unknown, or other
  modified_base (47)..(47): a, c, g, t, unknown, or other
  modified_base (54)..(54): a, c, g, t, unknown, or other
  modified_base (59)..(59): a, c, g, t, unknown, or other
  modified_base (61)..(61): a, c, g, t, unknown, or other
  modified_base (63)..(63): a, c, g, t, unknown, or other
  modified_base (69)..(69): a, c, g, t, unknown, or other
  modified_base (71)..(71): a, c, g, t, unknown, or other
  modified_base (84)..(84): a, c, g, t, unknown, or other
  modified_base (89)..(89): a, c, g, t, unknown, or other
  modified_base (92)..(92): a, c, g, t, unknown, or other
  modified_base (100)..(100): a, c, g, t, unknown, or other
  modified_base (107)..(107): a, c, g, t, unknown, or other
  modified_base (112)..(112): a, c, g, t, unknown, or other
  modified_base (115)..(115): a, c, g, t, unknown, or other
  modified_base (118)..(118): a, c, g, t, unknown, or other
  modified_base (121)..(121): a, c, g, t, unknown, or other
  modified_base (124)..(124): a, c, g, t, unknown, or other
  modified_base (127)..(127): a, c, g, t, unknown, or other
  modified_base (133)..(133): a, c, g, t, unknown, or other
  modified_base (137)..(137): a, c, g, t, unknown, or other
  modified_base (140)..(140): a, c, g, t, unknown, or other
  modified_base (144)..(144): a, c, g, t, unknown, or other
  modified_base (150)..(150): a, c, g, t, unknown, or other
  modified_base (156)..(156): a, c, g, t, unknown, or other
  modified_base (162)..(162): a, c, g, t, unknown, or other
  modified_base (165)..(165): a, c, g, t, unknown, or other
  modified_base (169)..(169): a, c, g, t, unknown, or other
  modified_base (174)..(174): a, c, g, t, unknown, or other
  modified_base (181)..(181): a, c, g, t, unknown, or other
  modified_base (200)..(200): a, c, g, t, unknown, or other
  modified_base (207)..(207): a, c, g, t, unknown, or other
  modified_base (235)..(235): a, c, g, t, unknown, or other
  modified_base (247)..(247): a, c, g, t, unknown, or other
  modified_base (253)..(253): a, c, g, t, unknown, or other
  modified_base (274)..(274): a, c, g, t, unknown, or other
  modified_base (279)..(279): a, c, g, t, unknown, or other
  modified_base (281)..(281): a, c, g, t, unknown, or other
  modified_base (308)..(308): a, c, g, t, unknown, or other
  modified_base (347)..(347): a, c, g, t, unknown, or other
  modified_base (350)..(350): a, c, g, t, unknown, or other
  modified_base (387)..(387): a, c, g, t, unknown, or other
  modified_base (447)..(448): a, c, g, t, unknown, or other
  modified_base (454)..(454): a, c, g, t, unknown, or other
  modified_base (461)..(461): a, c, g, t, unknown, or other
  modified_base (467)..(467): a, c, g, t, unknown, or other
  modified_base (471)..(471): a, c, g, t, unknown, or other
  modified_base (598)..(598): a, c, g, t, unknown, or other
  modified_base (713)..(713): a, c, g, t, unknown, or other
  modified_base (732)..(732): a, c, g, t, unknown, or other
  modified_base (738)..(738): a, c, g, t, unknown, or other
  modified_base (743)..(743): a, c, g, t, unknown, or other
  modified_base (764)..(764): a, c, g, t, unknown, or other
  modified_base (766)..(766): a, c, g, t, unknown, or other
  modified_base (1155)..(1155): a, c, g, t, unknown, or other
  modified_base (1164)..(1164): a, c, g, t, unknown, or other
  modified_base (1170)..(1170): a, c, g, t, unknown, or other
  modified_base (1172)..(1173): a, c, g, t, unknown, or other
  modified_base (1177)..(1177): a, c, g, t, unknown, or other
  modified_base (1179)..(1180): a, c, g, t, unknown, or other
  modified_base (1417)..(1417): a, c, g, t, unknown, or other
  modified_base (1425)..(1425): a, c, g, t, unknown, or other
  modified_base (1437)..(1437): a, c, g, t, unknown, or other
  modified_base (1458)..(1466): a, c, g, t, unknown, or other
  modified_base (1468)..(1468): a, c, g, t, unknown, or other
  modified_base (1470)..(1471): a, c, g, t, unknown, or other
  modified_base (1743)..(1758): a, c, g, t, unknown, or other
  modified_base (1962)..(1962): a, c, g, t, unknown, or other
  modified_base (1966)..(1971): a, c, g, t, unknown, or other
  modified_base (1973)..(1976): a, c, g, t, unknown, or other
  modified_base (1980)..(1984): a, c, g, t, unknown, or other
  modified_base (1987)..(1987): a, c, g, t, unknown, or other
  modified_base (1990)..(1990): a, c, g, t, unknown, or other
  modified_base (1992)..(1993): a, c, g, t, unknown, or other
cccacgcgtccgcccacgcgtccggacagacctaatgctctnattanagttcancctgncnancagaanancagttcatcattnccccntgncatattcnttttccntgctngcntantcncangangaaatncagnccntcangcgccnctgaanagcttnccntttntccgnagcaggntgtcagggcagaaaccaancaaaggntcatgcttcaccccttcctccatctgcntgcacctaccanctgatntctacagattccataacaggnacagnanattcaagacagagagaagaagagctgnaattaatagaccaactgcgtaaacatattgagtaccggntgnaaagtgtctctaccttgtgatctcggagcagctctanactgacggtgttgttctttgccatttggccaatcatgtgcgacctcgatctgtcccaagnnattcantgttccnctcacncagnctgtacctaaattaacaatggcgaaatgcaggcgaaatgtggaaaatttcctagaagcttgcagaaaaattggtgtacctcaggagcaattatgtttgcctctccacattttagaagagaaaggttngagccaggttgcagtgacggtccaggctctcctggaacttgccccacccaagcaacagcagcaccagttatctgctgtttgaggatccccaggacggtgggcactggcctggccnaaacaaggaacaggacacngtgatngctgntgccagctgtctgcttaaacnangctcttgtgtgttctcagaagggaccgttcccatgattcctaacaggaatattttgcttcatttctccattttaggggaggttatttccatttccattgaatttttttacgaagacaccattggttttctcagatgaaacttctcttactgaaaacccagcacctaacttggctgtgttttcctggagagcaggcgtgtttcacgtgccagaaagcacatcttctgtgttaggcacaagcatgctgtgccattgtttttacctggtctcaagacaactggtctgctggtttctaaacttggttgttcattagactctcctggagtatttgttaaaatacagattcacattcagtagagctggggtaaggcctaggaatctgcattttcnacaaccatngcacangnntttntnnttgttggagaaggagttctgctcagtcgcccaggctagagtgcagtggcataatctcggctcactgcaacctccgcctcccgggctcgggcgattctcctgcctcagcctcccgagtagctgggacagcaggtgcccgccaccagcctgaccaacatggagaaaccccgtctctactaaaaatacaaaattagctgggcgtggtggtgcatgcctgtaatcccagctactcgggagnctgaggcnaggagaattgcnttgaacccaggaggcggaggnnnnnnnnngncnngatcgtgccattgcaccccagcctgggcaacaaaagcgaaattccatctcaaaaaaagaaaacgcgccccatctcgctccaccacaagcgcctttatatactcaatgatgggtggaggaaaagggcccaagggctcacaccgcacaggagcctttactcaagtttcagctagttttccttcccctgcattttgaactccttttagttgttggtgatatcctttggtgttcactgcctttgtaaaacaagtaaataaagtaagcggaagatannnnnnnnnnnnnnnnagttgttaactgttctggattttctttacaatgcatccatttgggcataatgttatccctctttttatcaggtaaatgtagcatctaaaagtagctttggatcaaatcatgttgaatacctggtcaaagtaatgttttcttccttgttcttgcagagaaacaaattcatcagaacattaccacttgaccaggtttaaaattgtntaannnnnngnnnntggnnnnncangcntnnagtcccagcactttgggaggccgaggcaggaggatcacttgagcccaggggtttgagagcagcctgggcaacatagcaagaccctgtctcccaaaaatta

SEQ ID NO: 453 - DNA, 3339 bp, Homo sapiens
  modified_base (2717)..(2717): a, c, g, t, unknown, or other
acagtataaccgttacattttattattagttattgttgtcaatctcttaaggtgcctaattcataaacttaatcacaggtatgtatgcataggaaaaacagtatgtataaggtttgttattatctgtggttttagacatccactgggggtctggttttagatatccactgtatcccctgtggataagggggtaactgctgtatcttttagtagaagcaagagcagccccatgtgggagctaacactggacactggtcagtttcagctcctcatgcaaagtgagggtatccttgtggctccagccctggggccccctgcggtcacctttggctccacagtctggttcttgaacccaagggcagacagcttgctacagcccaggcctgaggatgcacttccttcaccaggacccacaacccctgcccatgaagacctgtggagctcagggcatcccctgatgcaggttggtcaggacctgcccagcttgcaccagcaggttctgcgtctccatctgacctggcagaccttgcactcttccacccactgtggaggactaagtgtcttgaacttccagaacacagccagggccccatacttggcctggggagaagttgggaggcctaagcagtggttgggggccacagcaaggcattgcacacagtggtttttatttctttcagggatttattaaggcattgagcacagtgtaatttctagccaagtgaaatgaatccaaggaaatatatcaggacctgagggatgtttttttaaagttactggaaaggatgatgagctgagagcacgtgtacagccacgcctgtgcgcagcgcccactctgtgcaataaacatgttctgcccatgttcctcagtcaggaggttcaggctcccggagagcacctgagggttccatcactttggtgcccaacaagcacatgcccccaacctggtgccaagaggcaggaatgacccccataccacatagctgcaggaaagcatccacggatggagggactcagctggcctggccgcagtgtggagcacagaggtatgaggcaagcaagggcagatctgagagcctgtaatgctaggcaggtgcagctggtgcgaggcgggctcccaccaggtgtaaggaaggtgggagccacagcctcttcctgggcccagaagcagccggcgccaggagatgcaggcccagggaatctgtctaaggcagctgggtctgcaccagccttctttccactcacaactcactgctcctgggagagcaggaggggcacacctttaaagagaaactgataagggaggaaaggcaggaggagatgaggccagccccactgatgacaccttgggccaggcctcacagctgcaggcatcagccggaaactccaggctgctcatggtcactggcggtgctgaactgtctctccactttcttttggtccttgatcttgagtccaatgtccactctcttctcaaagaagttcaccagcacggactccgtcaggatggaggccaggatctgctcaaaggagatgcaccagtcggtgtcgacggtgccgccgatgcgcgctgtggggctgcaggcctccccgcccaccagcaccgtgtcgtctgcaaggtcttcacattgcagggagcccgtgctgaccaccgagtaggaggacatggacatgtcgtctttggtttcatcgtcagacagcagctgggagggtgagccctgtccctcgccgctgcccccctccaccaccacctggctctcctgtggggcttttccgaggtgtgtgtctccgcctgctttggcttgggggtctcctgcagctgggggctgaagctccctggctgcgtcctgatgcagttcgggtgctggtggctcgtcctcctcagtggcacagtccctgggcttcctgcctgtgcgggctgagaacttcttccccacctctccgatgcggagcaggaggctggccacggtggcgatggcgtggtacaggtcctgctccatggggtcttcactgaacatgttgtaaagcgtcttgcacagctcaatgaactgctcctggttcatcttgggaagatccttaatcgtctccttctgagcctctttctccttggcccacattcgaaggtagtgccgatagtccggagagctggtccccttctcctctcctctctcctcacttccacttccttcttgctcttcctgtggtagtgcttcttctgaggagctgtcctctgtgaaataatgggccgcctccagggctgactcggcttcctctgggctcagagctgggggaaggtgtagcttgtagagcaccttgagcttctctgtcaggtccccgtggtacatcccgctcatccctgtcacgaactccttgaagttgatcagcgagtccttgttttcgtccaggagcctgaacatgcgccctgccagcagaggtgtgtgggagccacaggcccagggtgtcaggctggcaaagagttcccggaactggctggcatcaatccggtactgctccaggtagggcaggctggggtcccgacggccggccattgtgcggctgcacccccagtactggctagccaggtgcttggccttaaacaccatgtaaaggtcctccagctcttcaatggagaaaccaatgtccacaggtatagctcggaccacactcctcttggccgtgtcctccaaggactggatcactttcagcctctgtttaanccgcatctgctcaatgtcttcggccctcaggctgctgaatttctcataggaacactttcaggagctcaaagatgtccacctctgcaggagtagtaattcaccagcttctcgccctcaggcatcccttctgcgttccgcatcgttcagctcagcctccttgaacttcccggggtcctcgtctccactggggctgcaggttcttgttctcttcgtgcagatgattccagtgtatcgttgcccttgacgaaggtggtgatatcgtccgtcacatgtcgaagatggacagtgtctggagcaagttattttccagccattcccagtgttttgtgatctctttgcagggaagaaccacacgccactgtccagtagacactgggagtcctgggtctggtgcaggatgcaggtaagggcccacagcgggcactggagtccagcacacacgtcacagggtgcccacgagaagacccagtaaggcacagccagctccctgaccagtggccaccaggcagtcagcatgcaagcacagatagaacggggttggcccagctccgtcacccacagcgcattggccaccagcacactcactccgggctcagccacatcacggagccgctcgcaccgg

SEQ ID NO: 454 - DNA, 2738 bp, Homo sapiens
  modified_base (2453)..(2453): a, c, g, t, unknown, or other
ctttctacaaacaacccttcgctgacgtgattggttatgtgtatgttgcaaaactaattcctttttctacatctgattctttctacttttgtttagagttaatgctccttttatgtcacaagttgctttgctttttaaattatttcaaattggcactttgggggctgcctaagaattgataagcggggtatgatctgttgatgaatcttccagatttgtgactccctgcatcctctgatggccatttttcatatttggggttttggagggaagaaagctaactcgctttcaaaatgtgtcatttgcgatcttatctgggaacggtttgaggctcgggggaactctgctctcttgctcttggctgccatcactgctgccatgccctgttgcctgcctgcctcaggtgggaaggaggtttccccacctgggagcaggtggcagtcccaggtggttaggagccagtgagcagcagcaccttgcattgccaaaatcagagctgtggggcagcatttttccatacttggttcattcaaacaatgtggggtcgtttgcctctccctcaggcagaagagtccagagcagagggggttgtctccagtgggtgtctataattgttcctctgtggtcttgcatgtcagaaattgctatttagtggtcagcttctgatgtcctgtctcctagcacagggaagcccccagctttgagatcaggatagtcaaagtgtcttgatacgggccacttgggcttctccccctgacccccccaaaagaaacctgcatcttctctggagaaggtgtttttcttattcttttttttttctttttttcttttttcttttttttaaggatttcttttatcaaagcagtattgctgaagagttggaaacagttctcattgtctcctccttaaaaaaagggctggctttacatgagaagtaagggtggaatggaagaggagaggaacctgtggaaggtgggcgatgagctcaggtctgtagagcctctcagggcctatgaccttgagatgttcatccccttagaagatagaactgggtttcctgggcccccagatgcatttgcagtgagacttgtgaaatgctggacttacaggtggtgtttgatttgatttctgcacattctctctggagtagaaatggagactggaaaggtcgagtctggttttgctgggcagctgggtggccagcaaagccagctgcacgtccccaagcacagatagagtggcaagggcatgtccagcttactgaccatctgcattgagctcattctcattttctatatctgacttaaagtttctctcgtttcttttcttctcttcacctttaagcacaaacataaaccatccttgctacagcctagaacagttaagtaaacctttctcactgcccctaactgtgtgtgccatgaagtcgcagtgttgtagtggctctgggcttcagcggtgtttgccacggccatccctgtgatagtgccacctcagtccccacagaccagtcatctccattgcttttctttgcccgtgatgcttgttggagtagatgaatatagtgtgtcttagcgctgtcctttccggctgtagctcccaccagttaattccgaactgggggtgggctgaccttgatgtgaaagaatgttggagcagcatcctgccaaaaagcaactcacgttggctctcctgccagtgtgccctgagtggccccaaggcacctggctggagggaaaatggcaaacttttggctgaactggagaatgtcctaacaaacccccttccagaatggctttagtctctagtgcttgctagcatgggagctttgtcttgaattccttttgatctgccccgtttctctccagccttaggaataaatctagaggctattgtgcaatgatctgtgggctttttagaagtctctaaatttccttgaaattcagtacagcccagcataaactactcaagttcttgatcagcctgctgctttgttcttattaataaaagcagtgtgtagctggctaaggacttgttttattaatgctccacaggagcagagacagacagagagacatagtgagccttgaaccaaacacctgtattccaacattttacacagcggtctgggcaccctgtgcctaggagagccagctacgtgtctacctgagtctgacctgggccaggggctgttatcttgggaaagccagaatgtcattaagaaagggacaaataggcagttgcttgtgtagcaaggcagccaccaggttgctcaaagggggttctgcataaaccaacatattttgttgttgcttccagggcagcagaagaagcctttgtaaatgacattgacgagtcgtccccaggcactgagtgggaacgggtggcccggctgtgtgactttaaccccaagtctagcaagcaggccaaagatgtctcccgcatgcgctcangtcctcatctccctcaagcaggccccgctggtgcactgaagagcaccctgtggaaacactacatctgcaatatcttaatcctactcagtgaagctcttcacagtcattggattaattatgttgagttcttttggaccaaacctttttgtctttagagttgttcattgtttgtgattgcatgtttccttccttcaactgtgttctccctggcattcagagaggagggagaggaggaagaggaaggggagggaagcttgcatgcctgcaggtcgactctagaggatc

SEQ ID NO: 455 - DNA, 1721 bp, Homo sapiens
agacgggctgcaagagggagccggcccgacgcggaccgcttccctgcagtgccccgagtcccgggcccgcgccgccgccgcccggctccgctcgcggcccctctgtctgcaggcgtgccccggcggcggcggagagccgtcctcggccgaggaggctgggaaacgcgagcgcaggcggcagagaggcctcaacgccgtccctttcgccaccgccttttccttgcctcgcgccgctgtgcatttctctccttttcctttgtttttttggcccctcgcgggtgtgggcattgttggttagcaaaagtgcagcctcaagatggctgatggcaacgaggatctgcgggctgacgacttgcctgggccagccttcgagagctatgagtccatggagcttgcctgccccgctgagcgcagcggccacgtagccgtcagcgacgggcgccacatgttcgtctggggcggctacaagagtaatcaagtcagaggattatatgacttttatctgcctagagaagaactatggatctacaacatggagactggaagatggaaaaaaatcaacactgaaggtgatgttcctccttctatgtcaggaagctgtgctgtgtgtgtagacagggtgctgtacttgtttggaggacaccattcaagaggcaataccaataagttctacatgctggattcaaggtctacagacagagtgttacagtgggaaagaattgattgccaaggaattcctccatcatcaaaggacaaacttggtgtctgggtatataaaaacaagttaatattttttggagggtatggatatttgcctgaagataaagtattgggaacttttgaattcgatgaaacatctttttggaattcaagtcatccaagaggatggaatgatcatgtacatattttagatactgaaacatttacctggagccagcctataactactggtaaagcaccttcacctcgtgctgcccatgcctgtgcaactgtcggaaatagaggcttcgtgtttggaggcaggtatcgagatgctagaatgaatgatcttcactatcttaatctggatacatgggagtggaatgaattaattccacaaggcatatgcccagttggtcgatcttggcactcactaacaccagtttcttcagatcatctttttctctttggaggatttaccactgataaacagccactaagtgatgcctggacttactgcatcagtaaaaatgaatggatacaatttaatcatccatataccgaaaaaccaaggttatggcacacagcttgtgccagcgatgaaggagaagtaattgtttttggtggatgtgccaacaacttgcttgtccatcacagagctgcacacagtaatgaaatactaatattttcagttcaaccaaaatctcttgtacggctaagcttagaagcagtcatttgctttaaagaaatgttagccaactcatggaactgccttccaaaacacttacttcacagtgttaatcagaggtttggtagtaacaacacttctggatcttaaggcttcataaataatgcctatgatcaccttgcatggacagcaatcctgtaaacatcacagagtggcatcatttgtataattatatgcattgttgtagtttgcacctgttggttttaatgtgcatgtgaatggcctagagaacctatttttgtgtctaaagtttacaataaatgtatttaacacc

SEQ ID NO: 456 - DNA, 8592 bp, Homo sapiens
  modified_base (64)..(69): a, c, g, t, unknown, or other
  modified_base (72)..(72): a, c, g, t, unknown, or other
  modified_base (123)..(123): a, c, g, t, unknown, or other
  modified_base (132)..(132): a, c, g, t, unknown, or other
  modified_base (134)..(134): a, c, g, t, unknown, or other
  modified_base (425)..(425): a, c, g, t, unknown, or other
  modified_base (1261)..(1261): a, c, g, t, unknown, or other
  modified_base (1355)..(1355): a, c, g, t, unknown, or other
  modified_base (2679)..(2679): a, c, g, t, unknown, or other
  modified_base (3423)..(3423): a, c, g, t, unknown, or other
  modified_base (3587)..(3589): a, c, g, t, unknown, or other
  modified_base (3591)..(3591): a, c, g, t, unknown, or other
  modified_base (3594)..(3594): a, c, g, t, unknown, or other
  modified_base (3608)..(3608): a, c, g, t, unknown, or other
  modified_base (3614)..(3614): a, c, g, t, unknown, or other
  modified_base (3994)..(3994): a, c, g, t, unknown, or other
  modified_base (3996)..(3996): a, c, g, t, unknown, or other
  modified_base (4039)..(4039): a, c, g, t, unknown, or other
  modified_base (4052)..(4052): a, c, g, t, unknown, or other
  modified_base (4056)..(4056): a, c, g, t, unknown, or other
  modified_base (4116)..(4116): a, c, g, t, unknown, or other
  modified_base (4364)..(4364): a, c, g, t, unknown, or other
  modified_base (4372)..(4372): a, c, g, t, unknown, or other
  modified_base (4568)..(4568): a, c, g, t, unknown, or other
  modified_base (4784)..(4784): a, c, g, t, unknown, or other
  modified_base (5101)..(5101): a, c, g, t, unknown, or other
  modified_base (5527)..(5527): a, c, g, t, unknown, or other
  modified_base (5625)..(5625): a, c, g, t, unknown, or other
  modified_base (5766)..(5766): a, c, g, t, unknown, or other
  modified_base (6001)..(6001): a, c, g, t, unknown, or other
  modified_base (6130)..(6130): a, c, g, t, unknown, or other
  modified_base (6261)..(6264): a, c, g, t, unknown, or other
  modified_base (6267)..(6268): a, c, g, t, unknown, or other
  modified_base (6454)..(6454): a, c, g, t, unknown, or other
  modified_base (6456)..(6461): a, c, g, t, unknown, or other
  modified_base (6463)..(6464): a, c, g, t, unknown, or other
  modified_base (6467)..(6467): a, c, g, t, unknown, or other
  modified_base (6475)..(6475): a, c, g, t, unknown, or other
  modified_base (6486)..(6486): a, c, g, t, unknown, or other
  modified_base (6511)..(6511): a, c, g, t, unknown, or other
  modified_base (6563)..(6570): a, c, g, t, unknown, or other
  modified_base (6593)..(6594): a, c, g, t, unknown, or other
  modified_base (6596)..(6600): a, c, g, t, unknown, or other
  modified_base (6628)..(6628): a, c, g, t, unknown, or other
  modified_base (6644)..(6644): a, c, g, t, unknown, or other
  modified_base (6681)..(6682): a, c, g, t, unknown, or other
  modified_base (6763)..(6763): a, c, g, t, unknown, or other
  modified_base (6783)..(6783): a, c, g, t, unknown, or other
  modified_base (6986)..(6986): a, c, g, t, unknown, or other
  modified_base (6988)..(6989): a, c, g, t, unknown, or other
  modified_base (7205)..(7205): a, c, g, t, unknown, or other
  modified_base (7237)..(7237): a, c, g, t, unknown, or other
  modified_base (7712)..(7712): a, c, g, t, unknown, or other
aagcttgcggccgcggcggctggccggactcaggtgtttcggacgctattgcccttcgcgccannnnnncgngtgggcagcagcgggactcagccgggcgccaggttcctgccaggcagcgcngggaagcgngngcggccgagaactccttcctgctacttcgcccagcgccgctgcttcggcttcccagcgaagtgggagaccttcctccctgtttgcagacgtccgtgggagacccttattttttccaccgctaaggttaagagattctggaatagaagcgtcgaaggagatcaagtgaaccttctacaactcctcggatgtcgccagtctccctttcggggcggaagactacgtttgagcatctcactgaggtgcaggaatggaagaacccaccttgcagcttttctgcagtgtggcttgcntgatctacccctaggaatgaagaggaggcttgtaataatccgatgaagtacagatgttgaagaggatatcgcaggacctaaacttgtgatcgtttgggggaggtcacacacgtttctgagtgggaatggatgggcgtgaatgacgtgccctcttaaaaagcacaacaatcctttaagagagagcaaaattgagttttcccattttggccaagattttgaagacagttcaatgtattctacatttgacataagatgagaactttctaaagtattctctccaagagcgtaaacgatgactaccccagccctgctgcccctctctggacgtaggataccacctctgaacctggggccgccttccttcccacatcacagggctaccttgagactttctgagaagtttattcttctccttattcttagtgccttcatcactctgtgttttggggcattctttttccttccagactcttcaaaacacaaacgctttgatttgggtttagaagatgtgttaattccacatgtagatgccggtaaaggggctaaaaaccccggagtcttcctgatccatggacccgatgaacatagacacagggaagaggaagaacgtctgagaaataaaattcgagctgatcatgagaaggccttggaagaagcaaaagaaaaattaagaaagtcaagagaggaaattcgagcagaaattcagacagagaaaaataaggtagtccaagaaatgaagataaaagagaacaagccactgccaccagtccctattcccaaccttgtaggaatacgtggtggagacccagaagataatgacataagagagaaaaggnaaaaaattaaagagatgatgaaacatgcttgggataactataggacatatgggtggggacataatgaactcagacctattgcaaggaaaggacnctcccctaacatatttggaagttcacaaatgggtgctaccatagtagatgctttggataccctttatatcatgggacttcatgatgaattcctagatgggcaaagatggattgaagacaaccttgatttcagtgtgaattcagaggtgtctgtgtttgaagtcaacattcgatttattggaggcctacttgcagcatattacctatcaggagaggagatattcaagattaaagcagtgcaattggctgagaaactccttcctgcctttaacacacctactgggattccttgggcaatggtgaatttgaaaagtggagtagggcgaaactggggctgggcatctgcaggtagcagcattctggctgaatttggtacactacatatggagttcatccacctcagctacttgacaggggacctgacttactacaaaaaggttatgcacattcggaaactacttcagaaaatggatcgtccaaatggtctttatccaaattatttgaaccccagaacagggcgctggggtcagtatcatacatctgtcggtggcctgggagacagtttttatgaatacttactgaaagcatggttgatgtcagataaaacagaccatgaggcaagaaagatgtatgatgatgctattgaggctatagaaaaacatcttattaagaagtctcgtggaggtcttacctttattggagaatggaagaatgggcacttggaaaaaaagatggggcatttggcctgctttgctgggggaatgtttgcactaggagcagatggttccagagcagataaagctggtcattatttagagctaggggcagaaattgcacgtacttgtcatgagtcatatgacagaactgcattaaagctaggtcctgaatcattcaagtttgatggtgcagtggaggctgtggctgtccggcaggctgaaaagtattatatcctccgtccagaagtaattgaaacctattggtacctatggcgattcactcacgatccaagatacaggcagtggggctgggaagcagcactggccattgaaaagtattgccgagttaatggtgggttttctggagtcaaagatgtatattcctctactcctacacatgatgatgtacagcagagcttttttcttgctgaaacattaaaatatttgtatctgctgttctccggtgatgaccttttacctttagaccactgggtgtttaatacagaggctcaccctctgcctgtgttacatttagccaacaccacactttcaggtaatcctgctgttcgatgaaagcagttccagaaggaccattctcacctgtgtttngtttacatggaccactacagaaattagtttgaaggggcggcttttgaaaacctggacctctatgtcaacatgacagggtgaaactattccccctaagactgttcaacttgtagatacatcaactttgaaattattccattttatacctgaccaaaacatgttctgatatgtgtaggacagagacctggatgtgctttgatcgttaatgaggtggtcacatgagaagtgatacctgttactactgtattgtttttagagtcctgaagtctggaggctagacttcctgaaagcaagtcaagaatatagagcaccttgcaggagttcaagatggcctttggaaccaattatgtatttgtttcctcctacagtggagcagcattcaaatcaaatatttacatattgcttatcactttttctccattttaataatggaatgaactaaaataaacaagaacaaaagaatagtataattatatcagtaacaagaagactcaaaaaagaaacaggagtacctatccctatctgaattttcaagttccccattggatgaccagactggcaaccatttcaaatcccagtctatttcattgaaatttcttggttaagtttaattttctctgggggcatgatctcacaaagaatactcaagtctttttcttcttatggaatcatcgaaactgctatttatcataatcaccacttatgagcctgggtttgggattttgtgcatgtagttcagtctantgttggtagcatgacagaaagtggggaaaatgccgcagtttgttgccttgaaacctaagagcaatccttggttttgttgctacattatttttccagaccaacacatctaccaagtaaattttattcactttaatttcataataaagttagtagagtcactcaannnanaantttatttatgtggncttggncaaaaatcactataaggcagctctaaatttgccttgataagctaaataaattacttttataacttactaaagcagaacaaacagtgaaactttctaaaatattctatctggaatagggacaggggatcttttatttataatctcatcagatgagtgagttgttcacagatattttatgtttttttaattttctccaagaatatttatagaattccaaagaatcagaatagtttcaaaataattttcagtgataaaagagtgttgtaattaatcatattacactaaaattgggatacatctaaggaactttatcttactatcagtaggttttgcattgatatttctttttaaataaactactagttctttatattttgacnanaagaacttaaattttatcaggaactgtaagataaatatctagngcttataaatttnctgnccttaaatttatgtgacagtgcaagatacttttgctcttttcatttaatataggcatctnccattgacattaataaaacttagaaacagtataattagtataacatttactctgaatttgaagatttcctgaaacaaagtttgtacaagaagcccaccttggaattctgaaggcttattttcttgtttgataagcttttcttttaaacttaggttttaagttggggaaagacttaattaactaatatagtattttctaaggttgatcatcttataccacgaatcgttaattttgacagttctactganccgtaaangataaccactgcaaattttttcagtataaaatttttcactgcaaaaaaatttcagtagaaaataaggatgcagggccagttacaatagtccttaagagagttaaattatagcacatgttttgacattgtaatatcttttactacttgaacatttaaatttctaaatgagaaaggtatatatattactgtaactgtngaagggaaaagggaaagtatttggttctaaaaaatgttagccttcctcgtaaaagtagcacaagcccacttatgaatcactgagaaaaagtgaaaaacttgagttggcaaagatgcagagcagcagtgcagatggcaatgaactctctgaattctcttttaccttatttagaagaatgcagagtaaagggaccttcttggttctgcaggaacttcntcaagggatgaggagacagaacccctacttccaagtgctctatttgtattacccagatgactgaagcttaagagaaggcagggaagtatacaagcagagccagttctggtacaaacaaagaatttgacagggacaatggaagggtcttcttcaccactccttaccttctatgtgatggaaagactagagcttataaaagtacttccatttttttattctcctgaataccaaaggcaattaaagtcagctacaaatgacttgccagtgtcatgttttatttttgttatagatttttaaattatttccttcaagatcanttcttatcccatataatgcttagcttccaagaatattctttactttcttctgtcttttacagctctttgcattttgtagaccttaatactcaggttaaatattcattgcatttataagatcttctgcaaaaagcccagaaatggtccttttcaggtgcctcttcaaagagctgacaccttaccttgtgcctttggcacaaatgtgcagaatagatacatcagttggtgcataatcgaaaaaaataggaattttgaacactgttcttccttctacatttatttctcttcattttagaatcacactttttatgttaaaccagattattattattattattattcaaccagtattaagttgttaaaaccaagggaatggggccctaaccaaaaagaagtctcaactcagaaaaataagtccccagtcangtggttcttactttcttgtgggttgcacattttgtatctctctaacatcagcgtattcctgactttaagcaggtgtttatatgtaaaataaaacctgngtatcgaagggaaatgcattctttttatggagtattgaccctgatcctctatgatgtcatatagagcaactcagggctatacttgctagattttaaccaagcagtttgaaatattaatcatcatcctctcatcttctccantctccattgccaaagtctttgtcaaaactccaaatttgttgataaaagattgtgtttgccattctcatttataatgcagtttctccttaagcctggagttttttgaatgagtgcatgagtaaatgagagaatgtgtgaacgaacatttatgaagtatctaacatgtgccaagcattgtgcctggcactttcaatcattagaatgttttatgtgattccacagcattttctgtatnagagtagctcacaacattttaaatgtttccaatatgaatcgtgttacaaaattcttaattttatatttcatataaattaaagaggaaaaagaaaaggtttataatatattttaaaacaatgtgttactntataatacaactataattgtagttaataactaaaacctcttgaaaatgtcaaagaaatacttgatttctgatgcaactttgactaaaatatttactttagaaataaaaacgttcttattttgctatatcannnnaanngcataattaaaaagcagtgttttatagaaatgctggttattttatattcaaaaagattttgtcacataattcatgggtaaaacttgcagttgtaaattgtgtctgctctggtatgggccctattaatagtcccatgctgttaaatataaagaaaaatatactaaaatattcaaagttccaaataanannnnnnannaanagtatttngagttattttnctttaggtttccttatactcaaatnggctaggtcctatcttttcctctctctctctctctctctctctctctctctnnnnnnnnatatatatatatatatatatatnnannnnngagatatatgagatatatgagagatcangatctatatatgtatntaaatacaattatacacagataatttttaatactctnngttaacaaacacagttgaaaactggtttcggctgcacaaataagcagaatatttgagtaactatatatgatatggagatantttaatccatttatcctggnctcaagaacactgataaagatgattttctgttactttagctcattcagatcaggatggacatgctctttttgatctataactgttcagccagcttccagataatattttaggctatgagagctatacagtctctcttattactcatttctgctgttgaagtatcgaaaacagatagagatactatgtaaagaatgggcgtagntnngttccaggaaaactttatttacaaaagcagatggagggctggatttggtccatgggtcatagttagtgaccctgatcccaagtttattttgtgttagaccctctaacctttgatctgcgtcttttctgttttgatttacataattcatttttaaatcaaaaagatgtgcgtatatatggttgtgtgtatctgtataacctaaagctataatatttngttgtcttgaaagcagatacactcttcctggnagtctgttcaggtttcaggacgattgactataatgaaagagacagaatagggtaagggaagatgggtatgctatcagccattttctttgccttgtcatttaatgccataatttcagattctctatgtaaaaagaaggtctgtgtattgtcaaaataatatactctccaagttctcctgctcattgacccttgaaccaggattctggattgctagagctgcagaaattcacccacttgggtactcttagagctctacagcaagaatatgatagaatgtctgatctttgtgctgcagaaagcaaacttttgaagaattctaagcaacagaaaatgggttatgtgactcatctgctatttggcagccactattccttttttagactgcagaacggtactgcccctgttacctctagaatagcctgagtctgaggagtgcagagaaaagatatatccaaaaggagaatccctttctctntgcataactctcaatcctttacaagtaagtagcattatttcagaatgtctatatgcatcattttcaactaaagcatacctcatccttaaacttccactatttaacagctaatccatttcaaacttggtttgagcctagcaattgcagaactcataaaattgcttgtgaaattacacaccatattactagcatatacattgcagtgctccaatcatgctaacagataatagatttttctttaagaattttatcaaatatttcactatttggggaaattttagaggaggggaagcctgtattcaggatgatagagggagcagagacttactgtctctcttccacattataaatgaactgcctttccaggtccaacatgctgtcaggttgcttcagctcggtgtgaatgtaagtgtggggatcaaacacacacacctatacacatacatattaatatgcagaggattttaaataattgcaaatgtcttgtggctgttttatttctacaaaattctgtaagatgtataccagaaaacataataaagataagctcagttcttcattgggaaaaaatatttttaaagaaaatttagaagtttttgctgaattaaagtatcttcaattttaattactggatttggaagttgaaatgccatccttcaatatcactggtctcaaattcattgatagaattttttcttaaactaataagtggggtaagtataatctcctaaattggtacccactggctgctcctaaactggtttccagtcatgtcctccagtatgtgatttttataaattaaaggtaatattgtatattaaagttcaaataaagatgttctttaagtgaaaaaaaaaaaaaaaaaaaaaaaaaaaaaaaa

SEQ ID NO: 457 - DNA, 1486 bp, Homo sapiens
ttattccactggagaagccctgggggtggctggagccagcctgctgagaagcgtggtgcagctgggtctgggacttcactagagcttactctggagcacctattttctgtgcacatgggagtgctccactccctagcagagcagagggaagtctctgccaggtacccacgccacaggcctcaggatggctttttgtctgagggcctcattaggcccagactgctgctgctggtaccagtctcctgagacactgcctccctggagcccatgcatgcccagctgttcttactgcttagtagccttgaagcagcacatctccactgtccctggcaggattgtgggaggcttcacaacccctgctttcctgacttcctcttctgcccaacactgggtgccccttcccagtttcccagcaggggcttcatgggccaccgtcagtgggtctgggcctgccagagtcgtcttgctcttcctcttgcttctaggcaaccacacttggcaagttaaatgtcccaagcaccttgtctcccttcccaagaacaaaccatttctgtgcacatccttggaggcgagatgagctccttgcagagggccagagtaagtgcaagtcatggagtgcaggcagaggggtccatggcttccccagcccagggagggtatcagtatcattcattctctctcccctcactggtatgggttcagagcaatgcctagggcccctctctgctcccctgcctagtggggtggtagtggctacctctcagccccaatagtccctgctcctcttagaatcttcaccaagtggcaggccacctctgggcaggaccacctgcgtctggcacccaggaggtgaggcagacaccatggttaggtgatagggtctgaacccagttggggagacagaggggttcagacttgggaagaatctgtcagtgtgcatggagtgaggtgtgtgtgtgtggatggatgtgcacgtgtgcatgcttttttttctttttgccgtgaggacagttgaatttggggcatttttctacaagaagcagtcagccttctctcccccataaggactggctgtaaccttaagcccatcaaagttacttccagcctggagagaacctcaccaaacagctggtgtggcctgagggtggccatggtgggaaatgggcatgagaataaatacctccccaaattcaatctgagcccagcaggagaggatggtagggttgccagggctcagaagtgcaagctgattactcaccccaccctgcctcgccgcacctttcctttgtttccttgggtgaatgcaggagcagcagtggctgcccttcccacctggacagtggtgtgtgtagaaagccagctggatgtttgtggtggggcctcatggtgcctaggaggagataaagatgaggaggtttttccttattgtataaatgaatatttgtatgattaaattaacacacacaccaaaaaaaaaaaaaaaaaa

SEQ ID NO: 458 - DNA, 1766 bp, Homo sapiens
ggcaaatccggcccaggatgtagagctggcagtgcctgacggcgcgtctgacgcggagttgggtggggtagagagtagggggcggtagtcgggggtggtgggagaaggaggaggcggcgaatcacttataaatggcgccgaagcaggacccgaagcctaaattccaggagggtgagcgagtgctgtgctttcatgggcctcttctttatgaagcaaagtgtgtaaaggttgccataaaggacaaacaagtgaaatacttcatacattacagtggttggaataaaaattgggatgaatgggttccggagagcagagtactcaaatacgtggacaccaatttgcagaaacagcgagaacttcaaaaagccaatcaggagcagtatgcagaggggaagatgagaggggctgccccaggaaagaagacatctggtctgcaacagaaaaatgttgaagtgaaaacgaaaaagaacaaacagaaaacacctggaaatggagatggtggcagtaccagtgagacccctcagcctcctcggaagaaaagggcccgggtagatcctactgttgaaaatgaggaaacattcatgaacagagttgaagttaaagtaaagattcctgaagagctaaaaccgtggcttgttgatgactgggacttaattaccaggcaaaaacagctcttttatcttcctgccaagaagaatgtggattccattcttgaggattatgcaaattacaagaaatctcgtggaaacacagataataaggagtatgcggttaatgaagttgtggcagggataaaagaatacttcaacgtaatgttgggtacccagctactctataaatttgagagaccacagtatgctgaaattcttgcagatcatcccgatgcacccatgtcccaggtgtatggagcgccacatctcctgagattatttgtacgaattggagcaatgttggcttatacacctctggatgagaagagccttgctttattactcaattatcttcacgatttcctaaagtacctggcaaagaattctgcaactttgttcagtgccagcgattatgaagtggctcctcctgagtaccatcggaaagctgtgtgagaggcactctcactcacttatgtttggatctccgtaaacacatttttgttcttagtctatctcttgtacaaacgatgtgctttgaagatgttagtgtataacaattgatgtttgttttctgtttgattttaaacagagaaaaaataaaagggggtaatagctccttttttcttctttctttttttttttcatttcaaaattgctgccagtgttttcaatgatggacaacagagggatatgctgtagagtgttttattgcctagttgacaaagctgcttttgaatgctggtggttctattcctttgacactacgcacttttataatacatgttaatgctatatgacaaaatgctctgattcctagtgccaaaggttcaattcagtgtatataactgaacacactcatccatttgtgcttttgtttttttttatggtgcttaaagtaaagagcccatcctttgcaagtcatccatgttgttacttaggcattttatcttggctcaaattgttgaagaatggtggcttgtttcatggtttttgtatttgtgtctaatgcacgttttaacatgatagacgcaatgcattgtgtagctagttttctggaaaagtcaatcttttaggaattgtttttcagatcttcaataaattttttctttaaatttc

SEQ ID NO: 459 - DNA, 1348 bp, Homo sapiens
caggtggcgtacttggcttggagactggcgcggcgttcgtgtccgagttctctgcaggtcactagtttcccggtagttcagctgcacatgaatagaacagcaatgagagccagtcagaaggactttgaaaattcaatgaatcaagtgaaactcttgaaaaaggatccaggaaacgaagtgaagctaaaactctacgcgctatataagcaggccactgaaggaccttgtaacatgcccaaaccaggtgtatttgacttgatcaacaaggccaaatgggacgcatggaatgcccttggcagcctgcccaaggaagctgccaggcagaactatgtggatttggtgtccagtttgagtccttcattggaatcctctagtcaggtggagcctggaacagacaggaaatcaactgggtttgaaactctggtggtgacctccgaagatggcatcacaaagatcatgttcaaccggcccaaaaagaaaaatgccataaacactgagatgtatcatgaaattatgcgtgcacttaaagctgccagcaaggatgactcaatcatcactgttttaacaggaaatggtgactattacagtagtgggaatgatctgactaacttcactgatattccccctggtggagtagaggagaaagctaaaaataatgccgttttactgagggaatttgtgggctgttttatagattttcctaagcctctgattgcagtggtcaatggtccagctgtgggcatctccgtcaccctccttgggctattcgatgccgtgtatgcatctgacagggcaacatttcatacaccatttagtcacctaggccaaagtccggaaggatgctcctcttacacttttccgaagataatgagcccagccaaggcaacagagatgcttatttttggaaagaagttaacagcgggagaggcatgtgctcaaggacttgttactgaagttttccctgatagcacttttcagaaagaagtctggaccaggctgaaggcatttgcaaagcttcccccaaatgccttgagaatttcaaaagaggtaatcaggaaaagagagagagaaaaactacacgctgttaatgctgaagaatgcaatgtccttcagggaagatggctatcagatgaatgcacaaatgctgtggtgaacttcttatccagaaaatcaaaactgtgatgaccactacagcagagtaaagcatgtccaaggaaggatgtgctgttacctctgatttccagtactggaactaaataagcttcattgtgccttttgtagtgctagaatatcaattacaatgatgatatttcactacagctctgatgaataaaaagttttgtaaaac

SEQ ID NO: 460 - DNA, 3043 bp, Homo sapiens
ttttgaaaacacgctccgggagctagagcctgaggtcggcggcgcacgctgttgccccgtgggcttctgctccctcgcttgtcttctcgggcttctcgccccggccgcggccgggtcctcagtagtcgagaatgactaaaaaaagaaaacgccaacatgattttcaaaaagtgaaattgaaagttggtaaaaagaagcccaagttacaaaatgctactcctacaaactttaaaacaaagactatacatctgcctgagcaactcaaagaggatggaacacttccaacaaacaatagaaaacttaacataaaggatttgctgtcacagatgcatcactacaatgctggggttaaacaaagtgctcttcttggacttaaagaccttttgtctcaatacccatttataattgatgcacacctttcaaacatattaagtgaagtgactgctgtgtttacagataaagatgctaatgtacgattagcagcagttcaacttcttcaattcctggcccccaaaatacgagctgaacaaatttctccattttttcctttggtaagtgcccatctctctagtgccatgactcacattactgaaggaattcaggaggactctttaaaagttttggacattctgctggaacagtacccagctctaattactggccgtagcagcatattgcttaagaattttgtagaacttatttctcatcagcagctgtccaaaggactgataaatagagacagatcccagtcctggatactttctgtaaatcctaatcggagactcacttctcagcaatggaggctgaaagtcttagtgagactcagtaaattccttcaggccttggcagatggatccagtaggttgagagaaagtgaaggacttcaggaacagaaagaaaatccccatgccactagcaactccatttttatcaactggaaggaacatgccaacgaccagcaacacatccaggtttatgaaaatgggggttcacagccaaatgtcagttcacagttcaggctacggtatctggttggaggactgagtggtgtggatgaaggcctgtcatctactgaaaacctgaaaggatttattgagataataattccattgctaattgaatgctgggttgaagctgtacctccacaactagctactcctgttgggaatggtatagaacgagaacctctacaggttatgcagcaagttcttaatattatttcccttctgtggaaactctctaaacaacaggatgaaacccataaattggagtcatggcttcgaaagaactaccttattgattttaaacaccattttatgagtcgttttccatatgtcttaaaagaaataaccaagcacaaaaggaaagagccaaataaaagcatcaagcattgcacagttctctccaataacatagatcgtctcttactgaatttaacactgtctgatatcatggtctccctggcaaatgcgtcaaccttgcagaaggattgcagttggatagaaatgataaggaaatttgtaacagagacccttgaagatggctctaggctaaatagtaagcaactgaacagattgctgggagtatcctggaggttaatgcaaatacagccaaacagagaggacacagagactcttattaaggcagtttatacattatatcagcagaggggccttatccttccagttcggactttgttattgaagtttttcagtaaaatctatcagacagaagaactgagatcttgtagattcagatatcgtagtaaagtgttatcccgttggctggctggcttaccattgcaacttgctcatcttggctcccgaaatcctgagctctctacacagcttatcgatatcattcataccgctgcagcacgagcaaataaagaattactaaaaagtttacaagctactgccctccgaatttatgatccacaagaaggtgctgtggtggttctccctgcagactctcagcagcgtttggttcagcttgtatatttcctacccagtctgccggctgatttgctttctcggttaagtcgttgctgtattatgggaagactcagttcaagtttggctgccatgcttatcgggatactgcacatgagatcatcattttctgggtggaagtattcagctaaagactggttgatgagtgatgtagactatttcagcttcttattttccacacttacagggttttcgaaagaggagttgacttggcttcagagccttcgaggagttcctcatgtcatccagacacagctttcccctgtgcttctctaccttacagatttggatcaatttttacaccactgggatgtaacagaggcagtttttcacagtttattggttattcctgcccgaagtcagaactttgacatcttgcaaagtgccatcagtaagcatttggttgggttgactgtaattcctgacagcacggctggctgtgtttttggtgttatctgtaagctcctggatcatacttgtgtagttagtgagactctactgccatttctggcttcttgttgctacagtcttctttattttctgctcactatagagaaaggggaagcagaacatctaagaaagagggacaagctgtggggggtctgtgtctccatcctggctctcttgcctcgagtcctcaggttgatgctgcagagcctgcgggtgaacagagttgggcctgaggagctgcctgttgtgggccagctgcttcgactgctgcttcagcatgcacccctcaggactcatatgttgaccaatgcgatcttggtgcagcagatcatcaagaatatcacgacattgaagagtggaagtgttcaggaacagtggctcacagacttacattactgctttaacgtgtatatcactgggcatccccaagggcccagtgcactggctacagtgtattgaagaggccatagtacctcctgtttgaagttgtttattcacatctatcttatttgaagaaaaagactgatgtaatagatctttgtcattaaagctgaacttttaaaaaaaaaaaaaaaaaaaaa

SEQ ID NO: 461 - DNA, 2251 bp, Homo sapiens
gacgtcacggtcactgacagcgtgagcccgcggcggctgctgccatggtggctggcggccgggtaagggtctgagtggatctcctgccaggccagagcgccttcgggggccgcggcggaaggccaggagtttgcagccagggcgccgggtttgtggtctgcagtgtcgtgaggctgaggtgcagcatgtctagactgggagccctgggtggtgcccgtgccgggctgggactgttgctgggtaccgccgccggccttggattcctgtgcctcctttacagccagcgatggaaacggacccagcgtcatggccgcagccagagcctgcccaactccctggactatacgcagacttcagatcccggacgccacgtgatgctcctgcgggctgtcccaggtggggctggagatgcctcagtgctgcccagccttccacgggaaggacaggagaaggtgctggaccgcctggactttgtgctgaccagccttgtggcgctgcggcgggaggtggaggagctgagaagcagcctgcgagggcttgcgggggagattgttggggaggtccgatgccacatggaagagaaccagagagtggctcggcggcgaaggtttccgtttgtccgggagaggagtgactccactggctccagctctgtctacttcacggcctcctcgggagccacgttcacagatgctgagagtgaagggggttacacaacagccaatgcggagtctgacaatgagcgggactctgacaaagaaagtgaggacggggaagatgaagtgagctgtgagactgtgaagatggggagaaaggattctcttgacttggaggaagaggcagcttcaggtgcctccagtgccctggaggctggaggttcctcaggcttggaggatgtgctgcccctcctgcagcaggccgacgagctgcacaggggtgatgagcaaggcaagcgggagggcttccagctgctgctcaacaacaagctggtgtatggaagccggcaggactttctctggcgcctggcccgagcctacagtgacatgtgtgagctcactgaggaggtgagcgagaagaagtcatatgccctagatggaaaagaagaagcagaggctgctctggagaagggggatgagagtgctgactgtcacctgtggtatgcggtgctttgtggtcagctggctgagcatgagagcatccagaggcgcatccagagtggctttagcttcaaggagcatgtggacaaagccattgctctccagccagaaaaccccatggctcactttcttcttggcaggtggtgctatcaggtctctcacctgagctggctagaaaaaaaaactgctacagccttgcttgaaagccctctcagtgccactgtggaagatgccctccagagcttcctaaaggctgaagaactacagccaggattttccaaagcaggaagggtatatatttccaagtgctacagagaactagggaaaaactctgaagctagatggtggatgaagttggccctggagctgccagatgtcacgaaggaggatttggctatccagaaggacctggaagaactggaagtcattttacgagactaaccacgtttcactggccttcatgacttgatgccactatttaaggtgggggggcggggaggcttttttccttagaccttgctgagatcaggaaaccacacaaatctgtctcctgggtctgactgctacccactaccactccccattagttaatttattctaacctctaacctaatctagaattggggcagtactcatggcttccgtttctgttgttctctcccttgagtaatctcttaaaaaaatcaagattcacacctgccccaggattacacatgggtagagcctgcaagacctgagaccttccaattgctggtgaggtggatgaacttcaaagctataggaacaaagcacataacttgtcactttaatctttttcactgactaataggactcagtacatatagtcttaagatcataccttacctaccaaggtaaaaagagggatcagagtggcccacagacattgctttcttatcacctatcatgtgaattctacctgtattccagggctggaccacttgataacttccagtgtcctggcagcttttggaatgacagcagtggtatggggtttatgatgctataaaacaatgtctgaaaagttgcctagaatatattttgttacaaacttgaaataaaccaaatttgatgtt

SEQ ID NO: 462 - DNA, 1575 bp, Homo sapiens
agcttttattttctcctctccagtggggttggcttttattgtttcttgtttgggtttggaatggaaatatggatagcagcataaagtacttttattttgacaaaattcatttttttcaacaatggagacatagatttgacccacaataacttctccccctctctttttactctgctcaaaaagcatctctcctcccattacccaaccttggtcataagtgtgcctggctggtttgcagatatttgttctgctttgtaaaaattggccattagtgcatttattgagatgatctctaaagagctatgccctgacctacccctgattctatgacattggggcccttcttttgctgaaactgccttacgtaatggttttactccttgaaagagatttgacggaatccattttatgccaagtgctgccctgcactgtttctgcaatatgtggtgtatgctgtggtgatcttgctgggaatgattataagtgtgtgtgtgatgggggagtgggtattacatgcattgctgaagagtcatcctggtgttcctcattcctcccaccttcccgtggtcattttaattacggggcagtgtcaccgcaaagggaggaaactcaaagccgaaagcaaaattccaggcctgattctggcttttgaggttcctggttcttgaagccaggcctgacccgactctcagatggggtcagtcccgtcgctttgcagactgaccctggaaatctacaaaatgcagattttcctgatttcctcttctcttgcccagtttttttttttttttttttttttttttttaaagcctggattgtaaccagattttcttttttcccccttctcagctgtagatatgatatctcctttcagggccccagcttaagggcaaagtgagttaatgtgtagacaaaggcgagggacaagagagagttaacatctagacagtggaaaaagccatggtgtgtggtttctgggaaccaccaacacttgcaggtttagctttttcccagggttgactacaagaaagaaaaccatgtttttgcaagattaaaatgtggttgagtgtgcctaaattaaccatccccatttttatcatatttccaccatcacttcagggttttaagagtcagtgctcacctgggcggagctggtagtacattttgcttcttagaaagctaagtcctgggttccgtctgattttaggttccaggaacttcctgagaacacccgatcgcagagggtaattttctggagtttgttttgcagggatagctgggagtatggccaccctgctccacgatgcggtaatgaatccagcagaagtggtgaagcagcgcttgcagatgtacaactcgcagcaccggtcagcaatcagctgcatccggacggtgtggaggaccgaggggttgggggccttctaccggagctacaccacgcagctgaccatgaacatccccttccagtccatccacttcatcacctatgagttcctgcaggagcaggtcaacccccaccggacctacaacccgcagtcccacatcatctcaggcgggctggccggggccctcgcc

SEQ ID NO: 463 - DNA, 1947 bp, Homo sapiens
aggttggtctggaccggaagcgaagatggcgacttctggcgcggcctcggcggagctggtgatcggctggtgcatattcggcctcttactactggctattttggcattctgctggatatatgttcgtaaataccaaagtcggcgggaaagtgaagttgtctccaccataacagcaattttttctctagcaattgcacttatcacatcagcacttctaccagtggatatatttttggtttcttacatgaaaaatcaaaatggtacatttaaggactgggctaatgctaatgtcagcagacagattgaggacactgtattatacggttactatactttatattctgttatattgttctgtgtgttcttctggatcccttttgtctacttctattatgaagaaaaggatgatgatgatactagtaaatgtactcaaattaaaacggcactcaagtatactttgggatttgttgtgatttgtgcactgcttcttttagttggtgcctttgttccattgaatgttcccaataacaaaaattctacagagtgggaaaaagtgaagtccctatttgaagaacttggaagtagtcatggtttagctgcattgtcattttctatcagttctctgaccttgattggaatgttggcagctataacttacacagcctatggcatgtctgcgttacctttaaatctgataaaaggcactagaagcgctgcttatgaacgtttggaaaacactgaagacattgaagaagtagaacaacacattcaaacgattaaatcaaaaagcaaagatggtcgacctttgccagcaagggataaacgcgccttaaaacaatttgaagaaaggttacgaacacttaagaagagagagaggcatttagaattcattgaaaacagctggtggacaaaattttgtggcgctctgcgtcccctgaagatcgtctggggaatatttttcatcttagttgcattgctgtttgtaatttctctcttcttgtcaaatttagataaagctcttcattcagctggaatagattctggtttcataatttttggagctaacctgagtaatccactgaatatgcttttgcctttactacaaacagttttccctcttgattatattcttataacaattattattatgtactttatttttacttcaatggcaggaattcgaaatattggcatatggttcttttggattagattatataaaatcagaagaggtagaaccaggccccaagcactcctttttctctgcatgatacttctgcttattgtccttcacactagctacatgatttatagtcttgctccccaatatgttatgtatggaagccaaaattacttaatagagactaatataacttctgataatcataaaggcaattcaaccctttctgtgccaaagagatgtgatgcagatgctcctgaagatcagtgtactgttacccggacatacctattccttcacaagttctggttcttcagtgctgcttactattttggtaactgggcctttcttggggtatttttgattggattaattgtatcctgttgtaaagggaagaaatcggttattgaaggagtagatgaagattcagacataagtgatgatgagccctctgtctattctgcttgacagccttctgtcttaaaggttttataatgctgactgaatatctgttatgcatttttaaagtattaaactaacattaggatttgctaactagctttcatcaaaaatgggagcatggctataagacaactatattttattatatgttttctgaagtaacattgtatcatagattaacattttaaattaccataatcatgctatgtaaatataagactactggctttgtgagggagtgtttgtgcaaaattttttcctctaatgtataatagtgttaaattgattaaaaatcttccagaatt

SEQ ID NO: 464 - DNA, 1335 bp, Homo sapiens
tgattcggtcccgctgtcctaggcgggatggtgccgctgtgccaggttgaagtattgtattttgcaaaaagtgctgaaataacaggagttcgttcagagaccatttctgtgcctcaagaaataaaagcgttgcagctgtggaaggagatagaaactcgacatcctggattggctgatgttagaaatcagataatatttgctgttcgtcaagaatatgtcgagcttggagatcagctcctcgtgcttcagcctggagacgaaattgccgttatcccccccattagtggaggatagtgcttttgagccatctaggaaagatatggatgaagttgaagagaaatctaaagatgttataaactttactgccgagaaactttcagtagatgaagtctcacagttggtgatttctccgctctgtggtgcaatatccctatttgtagggactacaagaaataactttgaagggaaaaaagtcattagcttagaatatgaagcatatctacccatggcggaaaatgaagtcagaaagatttgtagtgacattaggcagaaatggccagtcaaacacatagcagtgttccatagacttggcttggttccagtgtcagaagcaagcataatcattgctgtgtcctcagcccacagagctgcatctcttgaagctgtgagctatgccattgatactttaaaagccaaggtgcccatatggaaaaaggaaatatacgaagagtcatcaacttggaaaggaaacaaagagtgcttttgggcatccaacagttaatcacttatgtttttagagcatgcaatcttaactttgttaaactattattattgatcacattttgatttttttctctccacatcaggatagtttactgaagcacaatctcttatactagtgggacaaaagggagaaaaaggaagcaagataaatgggtatgtaggatgaagggttatttaaaatggaactaaagatagaaggaggactgtaggaagaaatggaataatttaaatgtgaggaaagatatctgtggtagacatgtccttccatgactaatttctaattgtaactcaacacacattgaggtatgggccctcctcagtgactttaactagctcagaaacgtactcccccaccaaccccacctcaccgccccctatcccggttctgggagagcattgttattaaggatgcatgacaggaatgttggcagaactggaaagtattaaaaaagcattatcagacagtcttgatattatacattttcagaaatatattaaaaataataaactaaaacccatgatttcaaaagttaaaaaaaaaaaaaaaaaaaa

SEQ ID NO: 465 - DNA, 2489 bp, Homo sapiens
attaccaggcacgcgcaggaaacatggcggcggcgggtgttgtgagcgggaagattatatatgaacaagaaggagtatatattcactcatcttgtggaaagaccaatgaccaagacggcttgatttcaggaatattacgtgttttagaaaaggatgccgaagtaatagtggactggggaccattggatgatgcattagattcctctagtattctctatgctagaaaggactccagttcagttgtagaatggactcaggccccaaaagaaagaggtcatcgaggatcagaacatctgaacagttacgaagcagaatgggacatggttaatacagtttcatttaaaaggaaaccacataccaatggagatgctccaagtcatagaaatgggaaaagcaaatggtcattcctgttcagtttgacagacctgaaatcaatcaagcaaaacaaagagggtatgggctggtcctatttggtattctgtctaaaggatgacgtcgttctccctgctctacactttcatcaaggagatagcaaactactgattgaatctcttgaaaaatatgtggtattgtgtgaatctccacaggataaaagaacacttcttgtgaattgtcagaataagagtctttcacagtcttttgaaaatcttcttgatgagccagcatatggtttaatacaaaaaattaaaaaggacccttatacggcaactatgataggattttccaaagtcacaaactacatttttgacagtttgagaggcagcgatccctctacacatcaacgaccaccttcagaaatggcagattttcttagtgatgctattccaggtctaaagataaatcaacaagaagaaccaggatttgaagtcatcacaagaattgatttgggggaacgccctgttgttcaaaggagagaaccggtatcactggaagaatggactaagaacattgattctgaaggaagaattttaaatgtagataatatgaagcagatgatatttagagggggacttagtcatgcattgagaaagcaagcatggaaatttcttctgggttattttccctgggacagtaccaaggaggaaagaacccaattacaaaagcaaaaaactgatgaatacttcagaatgaaactgcagtggaaatccatcagccaggaacaagagaaaagaaattcgaggttaagagattatagaagtcttatcgaaaaagatgttaacagaacagatcgaacaaacaagttttatgaaggccaagataatccagggttgattttacttcatgacattttgatgacctactgtatgtatgattttgatttaggatatgttcagggaatgagtgatttactttcccctcttttatatgtgatggaaaatgaagtggatgccttttggtgctttgcctcttacatggaccaaatgcatcagaattttgaagaacaaatgcaaggcatgaagacccagctaattcagctgagtaccttacttcgattgttagacagtggattttgcagttacttagaatctcaggactctggatacctttatttttgcttcaggtggcttttaatcagattcaaaagggaatttagttttctagatattcttcgattatgggaggtaatgtggaccgaactaccatgtacaaatttccatcttcttctctgttgtgctattctggaatcagaaaagcagcaaataatggaaaagcattatggcttcaatgaaatacttaagcatatcaatgaattgtccatgaaaattgatgtggaagatatactctgcaaggcagaagcaatttctctacagatggtaaaatgcaaggaattgccacaagcagtctgtgagatccttgggcttcaaggcggtgaagttacaacaccagattcagacgttggtgaagacgaaaatgttgtcatgactccttgtcctacatctgcatttcaaagtaatgccttgcctacactctctgccagtggagccagaaatgacagcccaacacagataccagtgtcctcagatgtctgcagattaacacctgcatgatcactgttcttgcttttttgggaagagacactttgttgcaaccctttttcaagtacttgaaagttgaaaatttgaaatcttggtattgatcatgctttaaggtttatgtaaagaaagtgtactgatgttcttacattaaagctttacaaagatttaaactaattatttttgtagttacttctaccaaatagcctttccttttcgataacattcctcagtatttttatagccaagtacattttattttcttgctgatgaactggaattggataaatattgcaagtggatgagttggaaattatgcactttgaaaaacattcactttgtttaagcttattgggtttcagatttgattaaattaaatgtggaggctttctatagcattctaagctgagaagtagattgttacccagtaatgaaataaaaaataaaaataaaagg

SEQ ID NO: 466 - DNA, 1538 bp, Homo sapiens
aggccgaggcgggcggatcacctgaggtcgggagttcaagaccagcctgacaaacatggagaaacctcatctctagtaaaaatataaaaattaggcgggcgtggtggcgggcacctgtaatcccagctacttggagacagaattgcttgaacccgagaggcggaggtggcagtgagctgagatcgtgccactacactccagcctgcgcaacagagcgagactccgtctcaaacaaacaaaaaagtcagatctgtgctagacgctgaaaggaattaatcagacaggatctcagtcttttaaagaactttcaaatacagagaagaggtggtaacaaatcattagtgtataatattgcaagcgaaaaaccagaattgtgtgctaagtactggggtaacacagagatggtaattaattctttctggagaaacagcagtgaatgtgacaacctgagtgagggtggaaagcaggagaatttctagactctgaatttcagaagcttccggaactaaaatgatgtggaagttgagtgagtctcggtgggatattgctgctgcacctggtcaaggccgttccgtcagtgttttcagacgccctgggaacgcggctgcagggtccggtcttcggtttgcacagctagaggccgcgcacagcaaaggatgagcggaaccttggaaaaggtgctgtgcctgaggaacaataccatttttaagcaagccttttctctcttaaggtttagaacttcaggagagaagcccatctattctgtaggtggaattctactaagtatcagtcggccctacaagacaaagcccacccacggcattggaaagtacaagcacttaattaaagcagaagagcccaagaagaagaagggaaaagtggaagtgagagccattaatttggggacagattatgaatatggggttttaaatattcatctgactgcatatgatatgaccctggcagagagttatgcccagtatgttcacaacctctgcaactctctctccattaaagtcgaggaaagttatgcaatgccaaccaaaaccatagaagtgttgcagttgcaggaccaaggcagcaaaatgctcctggactcagtgcttaccacccatgagcgagtggttcagatcagcggtttgagtgctacgtttgcagaaattttcttggaaataatccaaagcagtcttcctgaaggagtcagactgtcagtgaaggagcacactgaagaagacttcaagggacgattcaaagctcgaccagaactggaagaactgttggccaagttgaagtagctactgtagaccctttcatgccagcagtggtcatattgagtgccaaagagaagagcttactgggtagttagagttcatcaggagacccaacccttagatttcataagtacccattcccatagccagtaatgtcctcactcctctgtggcttggctgtacttgccatttcttaccacttacctatgaggtaatgcttgttatcttccatctaataaaaatctgctgcagatgtgtatatgtaaa

SEQ ID NO: 467 - DNA, 658 bp, Homo sapiens
  modified_base (12)..(12): a, c, g, t, unknown, or other
  modified_base (18)..(18): a, c, g, t, unknown, or other
ggagcctcacgngagcgnggtaacgttatagtatttgtcagaagttggggtctccgtgggcattgtgatccgtcccaggcagtggattaggaggccagaaggagatcccttccacggtgctaggctgagatggatcctctcagggcccaacagctggctgcggagctggaggtggagatgatggccgatatgtacaacagaatgaccagtgcctgccaccggaagtgtgtgcctcctcactacaaggaagcagagctctccaagggcgagtctgtgtgcctggaccgatgtgtctctaagtacctggacatccatgagcggatgggcaaaaagttgacagagttgtctatgcaggatgaagagctgatgaagagggtgcagcagagctctgggcctgcatgaggtccctgtcagtatacaccctggggtgtaccccaccccttcccactttaataaacgtgctccctgttgggtgtcatctgtgaagactgccaggcctaggctctctgtagagagtcttcaagatcccggagtggtagcgctgtctcctggtgaaggagtatttgtcacactggaatgtgactgtgtgtgtatgtatgtgtatatatatatatatatatatatataaacaagtttgttgacacctacaaaaaaaaaa

SEQ ID NO: 468 - DNA, 1154 bp, Homo sapiens
gcagccaaagccccaggagccctaggttccaaccaactgatgcccctgtgcccactggcccacgccatgcagccccagtccgttctgcacagcggctacttccacccactacttcgggcctggcagacagccaccaccaccctcaatgcctccaacctcatctaccccatctttgtcacggatgttcctgatgacatacagcctatcaccagcctcccaggagtggccaggtatggtgtgaagcggctggaagagatgctgaggcccttggtggaagagggcctacgctgtgtcttgatctttggcgtccccagcagagttcccaaggacgagcggggttccgcagctgactccgaggagtccccagctattgaggcaatccatctgttgaggaagaccttccccaacctcctggtggcctgtgatgtctgcctgtgtccctacacctcccatggtcactgcgggctcctgagtgaaaacggagcattccgggctgaggagagccgccagcggctggctgaggtggcattggcgtatgccaaggcaggatgtcaggtggtagccccgtcggacatgatggatggacgcgtggaagccatcaaagaggccctgatggcacatggacttggcaacagggtatcggtgatgagctacagtgccaaatttgcttcctgtttctatggccctttccgggatgcagctaagtcaagcccagcttttggggaccgccgctgctaccagctgccccctggagcacgaggcctggctctccgagctgtggaccgggatgtacgggaaggagctgacatgctcatggtgaagccgggaatgccctacctggacatcgtgcgggaggtaaaggacaagcaccctgacctccctctcgccgtgtaccacgtctctggagagtttgccatgctgtggcatggagcccaggccggggcatttgatctcaaggctgccgtactggaggccatgactgccttccgcagagcaggtgctgacatcatcatcacctactacacaccgcagctgctgcagtggctgaaggaggaatgatggaggacagtgccaggcccaagaactagaactttcaaacgttcccggggcctcagacaagtgacaaccaaagtaaatgctgcttttagaactgt

SEQ ID NO: 469 - DNA, 2187 bp, Homo sapiens
cagagcagcggagctgccccgaacaaagatggcgcgggaagcgtctgtgagggcagactgatccgagcacccaaaccctcggcggacagcggagccagtggtagccgcacggccctaaaaccatggaggagggcggcagcactggcagtgctggcagtgacagcagcaccagcgggagtggcggggcgcagcaaagggagctggagcgcatggctgaggtcttggtcaccggggaacagctacggctcaggctgcacgaagaaaaggttattaaagatagacgtcatcatctcaagacctacccaaactgttttgtcgcaaaagaactgattgactggctgattgaacacaaagaggcttctgacagagagacggcaattaaactcatgcagaaattagcagaccggggcattattcaccatgtgtgtgatgagcataaggaattcaaggatgtcaaactcttctaccgctttagaaaggatgacggcaccttcccattggataatgaagtgaaggcctttatgagaggacagaggctatatgaaaagctgatgagccctgaaaacacactcctgcagcccagggaggaggaaggggtcaagtatgagcgcaccttcatggcatctgaattcctggactggctggttcaggaaggtgaggccaccacgaggaaagaggcagagcagctttgccaccggcttatggagcatggcatcatccagcatgtgtccagcaagcacccatttgtggacagcaatcttctctaccagttcagaatgaacttccggcggaggcgaagactgatggagctgctcaatgaaaagtccccctcctcccaggaaactcatgacagtcccttctgcctggggaagcagagccatgacaatcggaaatctaccagctttatgtcagtgagccccagcaaggagatcaagatcgtgtctgcagtgaggagaagcagcatgagcagctgtggcagcagcggctacttcagcagcagccccaccctcagcagcagcccccctgtgctctgcaaccccaagtccgtgctgaagagacctgtcacctctgaggaactccttactcccggggctccgtatgcaaggaagacattcacgattgttggtgacgcggttggctggggttttgtggtgcgaggaagtaagccatgccacatccaggctgtagaccccagtggccctgcagccgcagcaggaatgaaggtctgtcagtttgtcgtctctgtcaacgggctcaatgtcctgcatgtagactaccggaccgtgagcaatctgattctgacgggcccacggacgattgtcatggaagtcatggaggagttagagtgctgagctcctgggcctcccagccctccagtggcctgtgggtgagggaagccagaatgacacaaagcaatgcaaagacaagattgccatgcaaatggatggttttggacatacgagtcttctccgcacatacatgtctaaagttgagttttatacactgaatgtggaagaaccgggtatcatatcttttttaaaaaatgtcagtgtagaaaacatttgggaaaccattttcctacatgatagaactgccttactagatttctatttgtagctctcattcattgttttttatcttagtttgcagaaaggtgttgaaatgcttctctagcccaaacagcgacatgctaaagtccccttcttcagagtcaatagagtagttgttaaaggttttaaattgtactttctccaaaattagcatgcagctatttaatagggaatctagatttcaccaagattcaaatcaaagcaacatttaaaggaataagacctgttcactagcattttcaagggggttctaaagcattcaagtgcttaaaagccataaaaaatgacttcttaattcctgcctttagtgtcaacttttaagttaatacaggtttcaattgtggcattaggaaaaaaaaaaaaaccttgtgatgctatggttgggggtagttagggagagactacatgaaattgtgtgcccctattttctttctgatcctaaatcattttgttttataaatcagctatagcatctttctagaattaatcctgaatatgttgaatgttaaaatagagaagtttgtatatacacataattaaaaatcaacccttctggcaaaaaaaaaaaaaaaaaaaa

SEQ ID NO: 470 - DNA, 3345 bp, Homo sapiens
cagatgtccagttccagatgcctggacccagagtgtgggggaaatatctctggagaagccctcactccaaaggctgtccaggcgcaatgtggtggctgcttctctggggagtcctccaggcttgcccaacccggggctccgtcctcttggcccaagagctaccccagcagctgacatcccccgggtacccagagccgtatggcaaaggccaagagagcagcacggacatcaaggctccagagggctttgctgtgaggctcgtcttccaggacttcgacctggagccgtcccaggactgtgcaggggactctgtcacaatctcattcgtcggttcggatccaagccagttctgtggtcagcaaggctcccctctgggcaggccccctggtcagagggagtttgtatcctcagggaggagtttgcggctgaccttccgcacacagccttcctcggagaacaagactgcccaccttcacaagggctttctggccctctaccaaaccgtggctgtgaactatagtcagcccatcagcgaggccagcaggggctctgaggccatcaacgcacctggagacaaccctgccaaggtccagaaccactgccaggagccctattatcaggccgcggcagcaggggcactcacctgtgcaaccccagggacctggaaagacagacaggatggggaggaggttcttcagtgtatgcctgtctgcggacggccagtcacccccattgcccagaatcagacgaccctcggttcttccagagccaagctgggcaacttcccctggcaagccttcaccagtatccacggccgtgggggcggggccctgctgggggacagatggatcctcactgctgcccacaccgtctaccccaaggacagtgtttctctcaggaagaaccagagtgtgaatgtgttcttgggccacacagccatagatgagatgctgaaactggggaaccaccctgtccaccgtgtcgttgtgcaccccgactaccgtcagaatgagtcccataactttagcggggacatcgccctcctggagctgcagcacagcatccccctgggccccaacgtcctcccggtctgtctgcccgataatgagaccctctaccgcagcggcttgttgggctacgtcagtgggtttggcatggagatgggctggctaactactgagctgaagtactcgaggctgcctgtagctcccagggaggcctgcaacgcctggctccaaaagagacagagacccgaggtgttttctgacaatatgttctgtgttggggatgagacgcaaaggcacagtgtctgccagggggacagtggcagcgtctatgtggtatgggacaatcatgcccatcactgggtggccacgggcattgtgtcctggggcatagggtgtggcgaagggtatgacttctacaccaaggtgctcagctatgtggactggatcaagggagtgatgaatggcaagaattgaccctgggggcttgaacagggactgaccagcacagtggaggccccaggcaacagagggcctggagtgaggactgaacactggggtaggggttgggggtggggggttgggggaggcagggaaatcctattcacatcactgttgcaccaagccactgcaagagaaacccccacccggcaagcccgccccatcccagacaggaagcagagtcccacagaccgctcctcctcaccctctacctccctgtgctcatgcactaggccccgggaagcctgtacatctcaacaactttcgccttgaatgtccttagaaccaccttcccctacttcatctgttgacacagcttttatactcacctgtggaagagtcagctactcacccgctattagagtatggaggaaggggttttcattgcattgcatttctgaaacattcctaagaccctttagttgaccttcaaatattcaagctattctgcagctccaagatgcaattatagaaacagctccttttttattttatgtcctctatatgccaggtgcttcacctgttatttcacttaatcctcataccatatttgcaaaggatgtgttattatctatgtgtgacaaatgaggaaactgaggctcaggggataaagggacttgcccaagtcccacagctggtgtgtgactgcagagactgtgctcttcccagtgtgctgcaatacttctcaaccctcctctaacctgctgtgtcacccgctttccctcccagcccccacatccttaccattttccctccctgggaattcctgcttctgcgaaaatggtatcctctagctcacactttcctaatggccccatctcctgcagaagccaggtgagcccagcactggactgaagttcttgcagacaccccacctgtgcccctatcatcaggggaactgctccacctgagaggaccaactctttaatttttagtaaaacctgaaggtgatgggccgggcgcagtggctcacgcctgtaatcccaacaccttaggagtccgaggtgggtggatcacgaggtcaggagatccagcccatcctggccaacatggtgaaaccccatctctactaaaaatacaaaaattagccgggcgtggtgacacgtgcctgtagtcccagctactcgggaggctgaggcaggagaatcacttgaacctgggaggcggaggttgcagtgagctaagatcacgccactgcactccagcctgcggacagaccaagacttcatcccccccaaaaaaaaaagattggaggtgatttacagtgaaagacacaaataaaatacaactgttcaatggaaatagaaaataaacaccataaaagagagaagagaggtaatttgttagcatcaagagtcaagttgctatatggtcaaaggttaaatttatctctaaaaaatggcaggattcaaagttgtacatacatgtgattacttctgttttttacacccacatacagtacaaaagattattaaaaatattcccaaaaggcaggtgcaatgatgcacacttatacccccagccactcaggaggctgatgcaagaggatcgcttgagcccaggagttgaagtccagcctaagcaacatagtgaaaccccatctccaaaaatataataataattctctcaaaatactaaacagaggtggttttattgataagattttggctgtttggttttccactattctctattggctaaaatttgtttaatgagcatgaaatgtttttattttattttgcttatttttatgattgcaaaaaatgatatgagtttctccctgccaaggcaaaaaatatatatatatacctataaaaaaaaaaaaaaaaaaaaaaaaaaa

SEQ ID NO: 471 - DNA, 3472 bp, Homo sapiens
  modified_base (1009)..(1009): a, c, g, t, unknown, or other
  modified_base (1439)..(1439): a, c, g, t, unknown, or other
  modified_base (1493)..(1493): a, c, g, t, unknown, or other
  modified_base (1517)..(1517): a, c, g, t, unknown, or other
  modified_base (1663)..(1663): a, c, g, t, unknown, or other
  modified_base (1777)..(1777): a, c, g, t, unknown, or other
  modified_base (2012)..(2012): a, c, g, t, unknown, or other
  modified_base (2283)..(2283): a, c, g, t, unknown, or other
  modified_base (2935)..(2935): a, c, g, t, unknown, or other
  modified_base (3122)..(3122): a, c, g, t, unknown, or other
  modified_base (3238)..(3238): a, c, g, t, unknown, or other
  modified_base (3356)..(3357): a, c, g, t, unknown, or other
aaatcggtacaagatggcggagggggacgaggcagcgcgagggcagcaaccgcaccaggggctgtggcgccggcgacggaccagcgacccaagcgccgcggttaaccacgtctcgtccacgacctccctaggtgagaattatgaagatgatgacctagtaaattctgatgaggttatgaagaaaccatgtccagtacagattgttcttgctcatgaagatgaccataactttgaacttgatgaagaagctttggagcagatattgctacaggagcacatacgagatcttaacatagtagtggtatctgtggcaggagcttttcgtaaagggaagtcatttctactggacttcatgcttagatacatgtataacaaggattctcaaagttggattggtggaaacaatgaaccattgacaggctttacatggcgaggtggctgtgaaagagaaacaacaggcatacaagtttggaatgaagtatttgtgattgacagacctaatggaactaaagttgctgtgctgcttatggatacccagggtgcctttgatagccagtcaactatcaaagactgtgcaacggtgtttgctctgagcactatgactagctctgtccaggtatataatctgtctcagaatattcaagaagatgatcttcaacatttgcaattatttacagagtatggaagacttgcgatggaagaaatctaccagaaaccatttcagacattaatgtttttgattcgagattggagctatccttatgaacattcatatggtttggaaggtggaaagcaatttcttgaaaagagattacaggtaaaacaaaatcaacatgaagagcttcagaatgtaaggaagcacatacacaattgtttctcaaatcttggttgcttccttttgccacatcctggtcttaaagttgcaactaatcctagttttgatgggagattgaaagatattgatgaagactttaaacgagagcttcgaaatctggttccattgctgctntgcccctgaaaatttggtagaaaaagagataagtggatctaaagtcacttgtagagatcttgtagaatattttaaggcttacatcaaaatctatcaaggagaagaacttccacatccaaagtccatgcttcaggcaacagctgaagctaataatcttgctgcagtagcaggagcaagagatacctattgtaaaagtatggaacaggtatgtggaggggacaagccttacattgcaccttcagatctggagcgaaaacacttggatctcaaggaagtggcgataaaacaatttcgttcagtaaaaaagatgggtggagatgagttctgccgtcgttatcaggaccagcttgaagctgaaattgaagaaacctatgcaaattttataaagcacaatgatggcaaaaatatcttctatgctgctcgtaccccngccacactgtttgcggtcatgtttgctatgtatataatctcaggactgactggncttcattggcctaaactctatagnctgtcttgtgtaaccttgtcatggagttagcactgatatttctttgtacttgggcatatgttaaatactctggggagttcagagaaattggaacagtgattgatcagattgctgaaacactatgggaacaggtgttttccaaactntttgaagttactagacgtcgaatggttcaccgtgctctttcatcagcacagcgacagagactgtcatccaacaataacaagaagaaaaattagacagtatttttaacctttttntctatctgaagtgttcacacttacacatgtaggacaataagcaggaccgtctgggccggtctgcataaatgctgtatacataccagatttgatgctgcatatagggtatggaattgcacatccatctcataggaattgtaaatggtttgaataagaggaaagtaatttttgttgcattataaaatgtctagtagcatcataagtttttttgagagaagcatctttttatttcccntattcctggttattttcatcattgctttgaattgaatttttatatctatttttatatgtaactctttttttacctcatgtttttgtttgttttgcacatttctcataccacaggtattgaagcccctgggtgataatttgatggaggaaaacataaggcagtctgtaacaaactctatcaaagcaggcctgactgaccaggtgtctcatcatgccagattaaagacagactgacagttcatctcctcacggactccactctcttttttttncatgcttgctgtacaatgagaactcaaataaaaataaaccaaagtttacaatcaactgtagaagtagtttagtgtaactggcttcacagatggctgccacagagtgtgaagattgtttgttagttttaagcattcttttaatggctcctaagacatgcagatggactgaggagcattggttaatcatgcacctttgtgccatgtttaactcttttatttctttttacttaatctaatgttagtgaatttgtcttatgtaaaaggatatttcagggaaatattttcagaaatctatttagagtctctttaacacagtgtcccattgaaattttaatttttagagaatttatgaatcactgtttcaagaaccagattggaaagacaatgaagcctttattgagccactacattaaaagtatatattgctttactgccttcaataccagtattacatcaatgcatgtatcagaaacttcacagaaattacatggcaactcttgtagctaagaaagtaattctgaggtgtacatttgtcttgcctttttaaatttataaacttgccctaaaaggagatgcatatctgggaaactgaactgtctttttgcagtttagccttcatgtatataaaatatgccattaattttattggggnaagaaattccatccaaaaatgttgcctacagctatgagttaagagtgtctgtacagtgtgtagcttttattttctaaaatcacagatagggcatgtatatgacttataaatatataaatacgattttgtattaaaagttttgtagtttatggcaaaatctggtcctgtggtaggctaaataagtacngtccctgtgaaaggaatgtttgtggctcatgtcagtgtgtgaatgcatagacaatttgaagtttttgatatatttgtgatatttatcttgagcactgcaatctcaccccccccccncccaccaagggaattcaatgggaatgtttattgtgactttgtcctctgttgcattttaaagttatttcctgtaatttattttcagtacataattaaaaatttgttgtatatataaaannaaaaagggtctgtaaaaaaaaactccaaggggggggcccggtcctaatttcgccctaatagtgagtccgttttacaattcactgggccgtcgttttacaacgtcgggactgggaa

SEQ ID NO: 472 - DNA, 3521 bp, Homo sapiens
ggggggcgtgagagggcacggggaaaaggtggctctggccggggtggctcggtttcctggggctatgtaactgagctcgtcgacttaggggtccttcttcgctgccctcgccgcgtgctagcagggagtttccgctcgggagagagactgtcctcacgcccgctgcgcctcctcgacggcagagcaggcttgctcgcccgtgggagcgtcccggccgagaagccctgaggggggaggggaggccattttgtcccgaccgactccccggaaccgggcggagcggctgggagaggctgcggagccgcggtcgccgccctcggaggcactggacgccgccactgtcggggcttcctcaaagctgttcgtaggtcgcccgcgccgtctcgagccttttacccacgcttccccggtcctccggcctgagaacgcccgagtgaggagttggccgtagtgagagggaccgatcccttggggccgccggcggcgagagcccgagccgctcctcccaatggcgaagaagacgtacgacctgcttttcaagctgctcctgatcggggattccggagtggggaagacctgcgtcctttttcgtttttcggatgatgccttcaatactacctttatttccaccataggaatagacttcaagatcaaaacagttgaattacaaggaaagaagatcaagctacagatatgggatacagcaggccaggagcgatttcacaccatcacaacctcctactacagaggcgcaatgggtatcatgctagtatatgacatcaccaatggtaaaagttttgaaaacatcagcaaatggcttagaaacatagatgagcatgccaatgaagatgtggaaagaatgttactgggaaacaagtgtgatatggacgacaaaagagttgtacctaaaggaaaaggaggacagattgcaagggagcatggtattaggttttttgagactagtgcaaaagcaaatataaacatcgaaaaggcgttcctcacgttagctgaagatatccttcgaaagacccctgtaaaagagcccaacagtgaaaatgtagatatcagcagtggaggaggcgtgacaggctggaagagcaaatgctgctgagcattctcctgttccatcagttgccatccactaccccgttttctcttcttgctgcaaaataaaccactctgtccatttttaactctaaacagatatttttgtttctcatcttaactatccaagccacctattttatttgttctttcatctgtgactgcttgctgactttatcataattttcttcaaacaaaaaaatgtatagaaaaatcatgtctgtgacttcatttttaaatgtacttgctcagctcaactgcatttcagttgtattatagtccagttcttatcaacattaaaacctatagcaatcatttcaaatctattctgcaaattgtataagaataaagttagaattaacaattttattttgtacaacagtggaattttctgtcatggataatgtgcttgagtccctataatctatagacatgtgatagcaaaagaaacaaacaaaagccaggaaaacactcattttcgccttgaatatgtaaatgggattaattttgtcctgtgccttatgtggaaaggaacttctttggttttccttttttgttctggtggaagcatgtgcaggagacatatcatccaaacataaaccattaaaatgtttgtggtttgcttggctgtaattttcaaagtagttaattgaggacaaagggtaatgcagaagtgatagctttggtttgctgagtcttgttttaagtggccttgatatttaaaactattcctgccaccatttcttctccttggccacttcttccttgcgtctccctgcatgctgctttatttgcttctccctccccaaccacctcatggtatatttaagagtgaaagggacaaactagtaggtttgtcaagtttaatataaagcactgatgtaacttgctaggtaaacggaaagataagttctaactgcctactatccaatgtcagttaattggtgtcttcccccctcatttgctctcttccctaaaatgtgtcccagatgccttcatttgctgttttacttctatgttctgcttttcctcctctctttgttcccttcctgtctatccattgagtttatgaaatggaagagttaactgcatgcactagtgtttggagggtgttgtggtttgtctttctaattaggtgtatagcctattcactttcctagaataaatctcttaacctaaatttgagtagtctgcattttggcaactcctctagcagcttggtagcctagtacaggttgttttttaaaaaaaggaaaagcaggaaggaggagtgaattttattaacatgtttgccaaatgtattgagatttggcctctgaagaacactttttcagtgttaagtttctttaccttaagattcagaaatactttagaatattattaattttaagtcctgtctttacatccttttggaaaacttgtattaccatgagtttggaaaaaggacaacgaaaggcttttcatgtaaagataagatctttggctatctctaaccctgtccttttttcactgcattttttctagttttgcttcattgcttatcattaggatagggtaagtgaagtttgctatgctgctagcatcctaagatgatacctttgttgaaagaattgtgaatagcatgattcatttctagcagaggctgagtttaggactgcagcttccattgagaagtctttctgtgtcgtgaatagcattttaatgacctcttggctcacataagcaaacaacatagggacgtatctgctatgaaaatccacaaatttttcagatagtgccctaaaaacaattttatatgcctcactggttgttattcttaggttattcccacacttgactttatcattgtttactactagtaaaaagcagcattgccaaataatccctaattttccactaaaaatataatgaaatgatgttaagctttttgaaaagtttaggttaaacctactgttgttagattaatgtatttgttgcttccctttatctggaatgtggcattagcttttttattttaaccctctttaattcttattcaattccatgacttaaggttggagagctaaacactgggatttttggataacagactgacagttttgcataattataatcggcattgtacatagaaaggatatggctaccttttgttaaatctgcactttctaaatatcaaaaaagggaaatgaagtataaatcaatttttgtataatctgtttgaaacatgagttttatttgcttaatattagggctttgccccttttctgtaagtctcttgggatcctgtgtagaagctgttctcattaaacaccaaacagttaagtccattctctggtactagctacaaattcggtttcatattctacttaacaatttaaataaactgaaatatttccaaaaaaaaaaaaaaaaaaaac

SEQ ID NO: 473 - DNA, 1188 bp, Homo sapiens
cagggctgggcggcggcggcggcggcggtcatggaacgccaagaggagtctctgtccgcgcggccggccctggagaccgaggggctgcgcttcctgcacaccacggtgggctccctgctggccacctatggctggtacatcgtcttcagctgcatccttctctacgtggtctttcagaagctttccgcccggctaagagccttgaggcagaggcagctggaccgagctgcggctgctgtggaacctgatgttgttgttaaacgacaagaagctttagcagctgctcgactgaaaatgcaagaagaactaaatgcgcaagttgaaaagcataaggaaaaactgaaacaacttgaagaagaaaaaaggagacagaagattgaaatgtgggacagcatgcaagaaggaaaaagttacaaaggaaatgcaaagaaaccccaggaggaagacagtcctgggccttccacttcatctgtcctgaaacggaaatcggacagaaagcctttgcggggaggaggttataacccgttgtctggtgaaggaggcggagcttgctcctggagacctggacgcagaggcccgtcatctggcggatgaggctaagaatcttgttagtgtcacttttgacattagcaagatgaacccttaaccctcgattcaattgccttacgcacgcttttcacagtgactagccaaggggaggtggggttgatttctgttcctaactacacctgcatatgtcagggctccagtcagcaaaaggtatagatgttgcctctaggcatgaggtcattggtcacattctacttggagacagtgattgcattcattgatttcatggttaattgctagttggtaggtaaaggcctctagatgattagcaatcttgataaaagaggcctagtaatgttcttttgaggttagaaatccttgctgctaggacagtctctgtgacaggttgcgttgaatgatgtcttccttatcaatggtgagcccaccagtgaggattactgatgtggacagttgatggggtttgtttctgtatatttatttttatgtacagaactttgtaaaaacgaaactatttaaaaaacaagaataacatttttagcatctttattcaaggagatttatggacttcaatttgtctatcaaacattaaatagctttttatttccaaaaaaaaaaaaa

SEQ ID NO: 474 - DNA, 1355 bp, Homo sapiens
  modified_base (1301)..(1301): a, c, g, t, unknown, or other
gggcaggcagttgaggtggattaaaccaaacccagctacgcaaaatcttagcatactcctcaattacccacataggatgaataatagcagttctaccgtacaaccccggaggcgcagaccgtccacacgggacagggacgcccgctcggctccgctccgcgctgatcctcaaggtctcgcggtttccccgccgcccacccggacgccgacgaaagccagcgagctcctcagcctcaggcatctgcatctgggaccgacctcctgggctggctgatcaaagaggaagcagcagcaatgtctgctgtgggggctgcaactccatacctgcatcatcctggtgatagtcacagtggccgagtgagtttcttgggggcccagcttcctccagaggtggcagcaatggcccggctactaggggacctagacaggagcacgttcagaaagttgctgaagtttgtggtcagcagcctgcagggggaggactgccgagaggctgtgcagcgtcttggggtcagcgccaacctgccggaggagcagctgggtgccctgctggcaggcatgcacacactgctccagcaggccctccgtctgccccccaccagcctgaagcctgacaccttcagggaccagctccaggagctctgcatcccccaagacctggtcggggacttggccagcgtggtatttgggagccagcggcccctccttgattctgtggcccagcagcagggggcctggctgccgcatgttgctgactttcggtggcgggtggatgtagcaatctccaccagtgccctggctcgctccctgcagccgagcgtcctgatgcagctgaagctttcagatgggtcagcataccgctttgaggtccccacagccaagttccaggagctgcggtacagcgtggccctggtcctaaaggagatggcagatctggagaagaggtgtgagcgcagactgcaggactgacccctcacttgaccagtcccattcagatccggcttggacaggcacctgagatggtgccaaagtgcagctgactcttcccacgacagccctggccttcccatcaggcaggctcttcagtgagtgtttgaacgtaattatgtagttttctgtttaattgaaaaagagagctatgcctttttttctttttggaagtaaagcagctaaaacatgtttctataggtgagtgttggaccttcacacctccccttccctgtacatttgtctttggtgctggacgtggccatgtgaggccaggttgaggccctttgtagacaacatacagttgctcagcntggccccatgtagccaggtgcttttgtagatcttgtgtttcaggcagggcccgg

SEQ ID NO: 475 - DNA, 1273 bp, Homo sapiens
acgatggctactggggagctcggggacttgggtggctactacttcaggttcttgcctcagaaaaccttccagtctctgagctctaaggagatcaccagccggctccgccagtggtgaggaaccgaggcgcagggagagaagaggcccttggtcttcgcggctgtggaggcgcaggccgggcgtcgaggggcccgcgcgggtcggcgccattctgagtgaaccctgaggcttcctgagtgaaccccgaaccacccgggaagggcggatgctgtgggtgggatcggttatcggtgcgctctgagagggtgccagcccccagatgatttctttttcctcctctgccccaggtccatgctgggcagaatcaaggcgcaggcgttcggctttgaccagacctttcagtcctatcggaaggatgatttcgttatggcttttttcaaagacccaaatgttattcccaatttgaagttactttcagattcttctggacaatggatcatattaggaactgaagtgaaaaaaattgaagctataaatgttccttgcacacagctttcaatgtcattttttcatcggttatatgatgaagatattgtacgagacagtggacatattgttaaatgtttagattctttttgtgatccatttctcatttctgatgagttacgaagagttttgctagtggaagactcagaaaaatatgaaatattcagccaaccagatagagaagagttcctgttttgtcttttcaaacatctttgccttggtggagccctttgtcaatatgaggatgtgattagcccatatctggaaacaacaaagcttatctataaggatctggtgagtgttcgaaagaatcctcaaaccaagaaaatacagattacctcttctgtctttaaagtttcagcttatgattctgctggtatgtgctatccttcagcaaagaatcatgaacagacattttcttactttattgtggatcctatcaggcgtcaccttcatgttttataccactgttatggtgtgggagacatgtcttaatgttctttcagattatgtacctctactattttgtatttatcatttttctatcttaatactaacttatagataaacatatactttgcaaattaattcaagaaaaatgtaaggagcctacttagagcagaagaaagcaaacaccaagatgcctttttaaaaatttgtgtggaatactaaccggggatcaaatttcatccataataaaatctataccaaaaaaaaaaaaaaaaaa

SEQ ID NO: 476 - DNA, 2195 bp, Homo sapiens
  modified_base (134)..(134): a, c, g, t, unknown, or other
  modified_base (1932)..(1932): a, c, g, t, unknown, or other
  modified_base (2068)..(2068): a, c, g, t, unknown, or other
  modified_base (2141)..(2141): a, c, g, t, unknown, or other
tctctttttttttttttttttttttcgttcttttttttgttttttttttttttttttttttttttttttcacattttttttggatttatttaaagaacacacaaaaaagtgcatctaaatgatttttttttttnaaaaaacaatgtctttaattcctcatatgctgacttggcaatccatatgcagcctaaaaggtggttgaaagatgtctgtggacttctacacaaattgtttaagattattgaatttgatacaagaatacgtgaagtgtcttcttgagtggtaatgggcaccctgtagttatttgctcagaaccactcacacacccttcccctccccacacacacttttgccagttccccctggtgaaccataatacacacgtgggagacagctggcatcatctgagtcttggaatagctttcttgtttgttatctgcaaaaagctaggtggcctttttagtatcaaatttcaatcttggcctcactggaaccatgctctacagagctttcccaacagtttagcaagtaagcaaaatcagcttttgctcttcatatttcgtaggtgagactggggcttttaaaagaaatatttcataaaaaagacaaaagcataaatgagaaattagagggattttagttatcattaaaggaaaaaactcacaaattgatcccatttgttccatggggaagaaaagtattataaaaggaaataacttgatttttaggtttgaagggggtcccaatctaataataaaagtcttttgataaaaccatcataaaaataaaaactaatttaaaatataactgccagtgttttttaggatttaaaaaggtgagatgttccaggtttaagcaaatggttccttgggttgccaaatgcattcccatgagtgtttcttaggctgagggaatagagagccatgctcaatctgtttacccgtaaggactgaaattcaactacatgtacacatttaagacttgccctagttcaatggtcagctcaagtactggagatttaggctactggctgtgtaccggcatgggaagctgtcttcaactctttcacaactcacgccagaacagagaagcttgacagggcaggaaaagcgagcaactgcgtgtcaaacctgcaggtgaaacccctagtgtagaagagcaactatttatttgtcaacactacagattttgtttttaaaaattaagcttagtactaaaaagtcaaaatttttttgcatgatagaggagtgtaaataaagttccataaaccagtatacatatgcttatgagccaataatcttaaaaagacaaaaaaagctgcatggatcctaaatgactatgtaaatagatccactccaggtcaaaaatattgtaagcacaagtcttaaattcttaatagcaaggattagaatgaaagaagaagctgagcagtagcaatgctgggaggaagtactgtgtattgaatattattccctaaaaggaatagaggaggggagaaaaagcacaattctgattgctcttttcacatttcagtatctcagaacttcatcgaaaataggaaaagctaatccagaaactctcatctgctcattatcattgctgaagggtgttttaggaatgacagaattactcccccagggacaggctgtgtgtggtagaaagccactctcacaaggaggctggctgaggagggggactttgggaggaggctaagtcagcaagcaagtggcctctgaggttctggctttcacgtctgtgacactgctgtggaactggggagacatgagacccctctactgtgggttctgttggttaaaaatgcaacagactacatttatagcacttcagtcatttaaaaaacaaaagcttatcctccttcccctaccctacccaactgtaggaaaggagaaattcatgaagcatttttttttnaaaggtttctgcagtgctatgaaagttcaaaggtaaaacctaacagccccacattgttaggatgatctccagggaccctgaattggatacttgaaggttgatagaaactgaaatgagctggacttaagctgctggntcactccctccacaccacagtcatttctgtttgttccacctggagtggtcccgtgccacccctcagtgaaccntccgggcagcagcaggggggctgtttttgggaagctactggttttgccatttgc

SEQ ID NO: 477 - DNA, 620 bp, Homo sapiens
  modified_base (40)..(43): a, c, g, t, unknown, or other
  modified_base (45)..(46): a, c, g, t, unknown, or other
  modified_base (48)..(49): a, c, g, t, unknown, or other
  modified_base (51)..(52): a, c, g, t, unknown, or other
  modified_base (54)..(55): a, c, g, t, unknown, or other
  modified_base (57)..(62): a, c, g, t, unknown, or other
  modified_base (64)..(68): a, c, g, t, unknown, or other
  modified_base (70)..(80): a, c, g, t, unknown, or other
  modified_base (91)..(94): a, c, g, t, unknown, or other
  modified_base (353)..(353): a, c, g, t, unknown, or other
  modified_base (609)..(609): a, c, g, t, unknown, or other
  modified_base (611)..(613): a, c, g, t, unknown, or other
  modified_base (615)..(615): a, c, g, t, unknown, or other
agagctgtgacagctggctacactgctggcagttcacacnnnntnntnntnntnntnnnnnncnnnnntnnnnnnnnnnnttttttttttnnnnttcctatttttgtttaatttatttaagaccacctccttacaacttccagagagaaaatacaaaacaagaaacagacttggtttcaaatgcataaccaggtgctggagtttaaagcattactgataacattgttacagaagaatggcagcttactccagggcacttcagtattcctgaggaataaacatgatttctcttgtcctcccgctgggatgttctcaggtgaagtcactgctcctgctctttgacatattttccntgtagaagatatggagcctggaaatcatgctgacagttggaataagccattcctaatcccatgccagaaccgaaggctaatggccacattcttcttttaaagaaggtaagtgagaaaacaattcctaatccaaaaccagtacctatcttcacgaccgcatccgccagacaccggtcccacttcctgccgagctccgactcagacatgttccccacccgcgcctccagctttcctctcggccggcccccgcgctccnannncntgaaa

SEQ ID NO: 478 - DNA, 2619 bp, Homo sapiens
  modified_base (719)..(719): a, c, g, t, unknown, or other
  modified_base (820)..(820): a, c, g, t, unknown, or other
  modified_base (823)..(832): a, c, g, t, unknown, or other
  modified_base (834)..(838): a, c, g, t, unknown, or other
  modified_base (840)..(840): a, c, g, t, unknown, or other
  modified_base (1164)..(1164): a, c, g, t, unknown, or other
  modified_base (1323)..(1323): a, c, g, t, unknown, or other
  modified_base (1883)..(1883): a, c, g, t, unknown, or other
  modified_base (1914)..(1914): a, c, g, t, unknown, or other
  modified_base (1923)..(1923): a, c, g, t, unknown, or other
  modified_base (1947)..(1948): a, c, g, t, unknown, or other
  modified_base (2080)..(2080): a, c, g, t, unknown, or other
  modified_base (2418)..(2418): a, c, g, t, unknown, or other
  modified_base (2513)..(2513): a, c, g, t, unknown, or other
  modified_base (2577)..(2577): a, c, g, t, unknown, or other
  modified_base (2595)..(2596): a, c, g, t, unknown, or other
  modified_base (2606)..(2606): a, c, g, t, unknown, or other
  modified_base (2610)..(2611): a, c, g, t, unknown, or other
  modified_base (2614)..(2616): a, c, g, t, unknown, or other
  modified_base (2618)..(2618): a, c, g, t, unknown, or other
ttttttttttttttttttttttttttacattttaaaaaattatctttatttaggtttctgattcagcacatgtatcaaagactaatcaacataaaggagtaaataagacattaattgaaagtcttacatctctctaaactctgaccaagaatgtcaagattgccactattaccagaactccaacctagtcaagttgtagacaagctatcatgaacaacatacagtgtgcacagatatgcagaggcaaaaggcatgctagcgcttggctctcctcttttccttgttgacatctttctgttggacagtccactttcgctttccaggctaagttccaaatcaagtccaaagaaggctcagggtcaacctgaccagatactcttctggaggaatgcattcttaaactgttgtgcctgcaactttgtttttgccaggatgaagttcagaccgagatgtacaatacaatctagatgacggtgcagactaagtcaagaactaaagttgtgcagtaacccgagttaaggcatgaatgcagacacacacatgcacacacacagcacccatgctatcaagacacaggattttttcagttgcctcatgagaggcaacctgggcttggcagttaatcagaactgctgagcattccagaaaatgccccccacgactttatgctaacagctgtgtgtatgttttaatcaaaaaattaaagaagaaaaaaaaanccctaaaaaacaaagaaaaaaacaaacaaaaaatcaccaaaaacctagaaaccccttaatctcttacaatggctcttgagcatggaactcatgtagcagcntcnnnnnnnnnntnnnnnanaatttggaaataaaaggttgttttactatgtatttctttggtagtcatcactacaaagttttcagtgttggttacctataagacaagtactagacagaagatcaagttacacagaaatatttcttctgtactgataagatacaaatattgagctctcaaagcacaagttactatgctttttcttgccttattgggcattctctaaaagcaaggctttgtgcaggaaaagttcatgtctacctaacaaagggtgatacatgttctattttcctacaagtgaacaattaacaaaaattcacattatcaattatttctggttgaatnctgttagaagccaattacaaagggacagtagcacttggtgtcaaagccactttctggtcacacattcattccatggttgctagtcagtatctcaggagctcagaatttaaaactcctttcagtcaacgaaggagtaagttcaattaaaggcttccactntctgccaaatttctagaattctgtctagagtgctagcatgcttgatgagagaaagcagttcagagcccaaagaggtgtcaggtattaggtaagttaatttggttttgtataaaaggcatggtaatctggcaacagagtacttatcctattagcagcacagtggtagccaagggtctctgtctgcaagacaggaaaatgaagctactgaagcccctgttgctcccacctgcctgcaggatggctactgattttacaaaggccttctgggagccaatccagggctcacctgggagagtgggtaacagaatggcaggaaccatgttcagcccccatgagaagtgcccgactgagggaagtcagcttcccataggtgagggggctgttgccattatgggctcagaatctaaatcttactgatccctagtagtaagacaattgccaagaaattgtcctagcaggtactacccaagtgttacaggctctgcataggtcctcaaacactttaaaggacacgaaccatcaaattcaaaagagtagtgtttgttctatcagttctgaantgtccacagggagaggcaactagatttatgntggaaaaangtgctgtttgaaggagctgtgttnnatttcgaagtgaaatgactttgggaaccagaacatttctgcagatgtctgaatatcaagaacctatctctaaaaggcatttatcaggaaatgttcgctcactccaagtgctttttaaaaattcaacatatgncaatgttttaatttttgtgctttcaagaggtaactaaatcgataggaagctgagggaagatcattccattatggactttcttgtttgggtgcaagacactatccacagcattgaaatctataatctcataaaagattcttataaacatataccatatttctcctataagaaaaactgagaactgtaccatgaaggcaaaatttgtttgcctactctcagaattccttggaatggcaatgtaccaggagggtgagtgaactgttggtgaaaattccgggtttgacatggcccagtctgatcacatcaaaaacctaaagcctcaatgattaaatgccaancttcttccctgcatctgagaactgtattatgattatgtatattacacatacattataaataaaatttatatagacctacagtttcttccaaacanttgagtgatgttctcagtttgggggtggaagcaggaagaggtgaaaaaatcttattgttgcttntactctcaagttcttaanncgctagtcancacnnttnnncnc

SEQ ID NO: 479 - DNA, 4873 bp, Homo sapiens
  modified_base (263)..(269): a, c, g, t, unknown, or other
  modified_base (271)..(274): a, c, g, t, unknown, or other
  modified_base (277)..(284): a, c, g, t, unknown, or other
  modified_base (304)..(304): a, c, g, t, unknown, or other
  modified_base (1857)..(1857): a, c, g, t, unknown, or other
  modified_base (1860)..(1861): a, c, g, t, unknown, or other
  modified_base (1870)..(1871): a, c, g, t, unknown, or other
  modified_base (1884)..(1884): a, c, g, t, unknown, or other
  modified_base (1893)..(1893): a, c, g, t, unknown, or other
  modified_base (1904)..(1904): a, c, g, t, unknown, or other
  modified_base (1915)..(1915): a, c, g, t, unknown, or other
  modified_base (1949)..(1949): a, c, g, t, unknown, or other
  modified_base (1951)..(1952): a, c, g, t, unknown, or other
  modified_base (1954)..(1957): a, c, g, t, unknown, or other
  modified_base (1988)..(1988): a, c, g, t, unknown, or other
  modified_base (2150)..(2150): a, c, g, t, unknown, or other
  modified_base (2162)..(2162): a, c, g, t, unknown, or other
  modified_base (2502)..(2502): a, c, g, t, unknown, or other
  modified_base (2737)..(2737): a, c, g, t, unknown, or other
  modified_base (2932)..(2932): a, c, g, t, unknown, or other
  modified_base (3371)..(3371): a, c, g, t, unknown, or other
  modified_base (4004)..(4004): a, c, g, t, unknown, or other
  modified_base (4011)..(4011): a, c, g, t, unknown, or other
  modified_base (4021)..(4021): a, c, g, t, unknown, or other
  modified_base (4028)..(4028): a, c, g, t, unknown, or other
  modified_base (4051)..(4051): a, c, g, t, unknown, or other
  modified_base (4055)..(4055): a, c, g, t, unknown, or other
  modified_base (4057)..(4057): a, c, g, t, unknown, or other
  modified_base (4076)..(4076): a, c, g, t, unknown, or other
  modified_base (4079)..(4079): a, c, g, t, unknown, or other
  modified_base (4081)..(4082): a, c, g, t, unknown, or other
  modified_base (4086)..(4086): a, c, g, t, unknown, or other
  modified_base (4102)..(4102): a, c, g, t, unknown, or other
  modified_base (4114)..(4114): a, c, g, t, unknown, or other
  modified_base (4188)..(4188): a, c, g, t, unknown, or other
  modified_base (4232)..(4232): a, c, g, t, unknown, or other
  modified_base (4234)..(4234): a, c, g, t, unknown, or other
  modified_base (4236)..(4236): a, c, g, t, unknown, or other
  modified_base (4313)..(4313): a, c, g, t, unknown, or other
  modified_base (4317)..(4317): a, c, g, t, unknown, or other
  modified_base (4323)..(4323): a, c, g, t, unknown, or other
  modified_base (4327)..(4328): a, c, g, t, unknown, or other
  modified_base (4331)..(4331): a, c, g, t, unknown, or other
  modified_base (4337)..(4337): a, c, g, t, unknown, or other
  modified_base (4340)..(4340): a, c, g, t, unknown, or other
  modified_base (4342)..(4342): a, c, g, t, unknown, or other
  modified_base (4346)..(4348): a, c, g, t, unknown, or other
  modified_base (4352)..(4352): a, c, g, t, unknown, or other
  modified_base (4361)..(4361): a, c, g, t, unknown, or other
  modified_base (4364)..(4364): a, c, g, t, unknown, or other
  modified_base (4383)..(4384): a, c, g, t, unknown, or other
  modified_base (4401)..(4401): a, c, g, t, unknown, or other
  modified_base (4816)..(4816): a, c, g, t, unknown, or other
  modified_base (4845)..(4845): a, c, g, t, unknown, or other
cttttttgcttctgctttaaaaataggcttctgaggactgtgaattactatcgttaaaataacaatgatggagattccatgcactgtaaagcacttcagggaagagaacaaaaatcacaggaattgaatcaacaaaggaaaaatgagaagcacaaagaaaacctaggacatttccctttttgttttaaactgggaaattctaactccttggaggaagacaatgatactctgattcaagagagaagctaaaaaagcacaagtcnnnnnnntnnnnttnnnnnnnntttttttttttttttttttntcagcagaaatcacaaatttattaactcttaaatatatcaatcagtcctttaccattatggcaagaaatatatacagtgtcccatggtaaactgcagtgtttcaaaatgatagaagataataaatgtgtaattcatttgtggtggagagaacaaatcacaatttcctcacatcttagtgcggaagacaaacttgatctacagtaatacttcaacaccacatgctaagttaaaagtgtaaaaaaaacactctacatctatttttttttctttaaatacatgtatgccacgtatagctgcttcacaaaagggtaaaagaaattaaaaagagaaaaatgaggccattattttttcacagatctcattggcaggttaacatggctcaatatatttactgtatatatttattttaaatatatatgttgttttaaattgtgtaataattatcagaaaagcttcaacccatctaccatacatccactagcaataatatctaagatgattagtaatcaacacagagaggtgagatgagagaaaagaggaagggttgtttttgttattttgtttttcttttttgcttctgctttaaaaataggcttctgaggactgtgaattactatcgttaaaataacaatgatggagattccatgcactgtaaagcacttcagggaagagaacaaaaatcacaggaattgaatcaacaaaggaaaaatgagaagcacaaagaaaacctaggacatttccctttttgttttaaactgggaaattctaactccttggaggaagacaatgatactctgattcaagagagaagctaaaaaagcacaagtcacaaagatcaagttcaaaacacttatgagaatggcaaacatttgtaagcctctctaacactagaaaactagctagtgatgatgcagaagtgaccctttcattccccaaggcggaggtgagtgcgtttgcataaaaccccctctgctatcaagttggtatcctcctggcaactgtcccaatcagtaagacgttgcagtcacaggaggaacttgcttttatcctaactttaaacaatgcaaatacctccaacatagttaggatacctaagtccaaactagagcttaagcagaattataaacctttaaaatcttgacaacatttttgtgggccctgaagatgatcaaaagtgctagtatagctaccttcaaaagacttttatttcccttttacattcattatgcaaatttcacttctattcttttctcacacactactagccagcctccccaaaaaaggaaaagggaaaaaagtaagaaaagaatggaacaaaagaaaaataagaaagcaaacgaaaggaacaaagaaacaggataaagaaaagagatcacagatttgagaaagaaaaacaattcaattcagcaaattcaccaaaacaatgtgaatatatcctaaagtgattaaactcagaaatgatgtgaatttttccagtttacacagtttgaccaaaaacagcatggctttatgtggtagcaaaccaactgattcttgcttctactttcataantgnnttttgcccnnatatcatcccacntttaattgnttaatcagcanaaactttcaangaaaaatcatccattttaaccaggatcacaccangnnannnnaaggtgtattttttttttaccttaaaaaaanaaaaaaaaaaaccaaacaaaccaaaacagattaacagcaaagagttctaaaaaatttacatttctcttacaactgtcattcagagaacaatagttcttaagtctgttaaatcttggcattaacagagaaacttgatgaagagttgtacttggaatattgtgnattttttttttngtctaatctccccctattgttttgccaacagtaatttaagtttgtgtggaacatccccgtagttgaagtgtaaacaatgtataggaaggaatatatgataagatgatgcatcacatatgcattacatgtaggaccttcacaacttcatgcactcagaaacatgcatgaagaggaggagaggacggcccagggtcaccatccaggtgccttgagaacagagaatgcagaagtggcactgttgaaatttagcatgggtgtattaacaaagaagctgacagcctggaaatatttacttgatgggtactgttggtgaccccgagcgatgaaaatgaacattctnccactttccatcccggcggtgccacacacgagtctcttctgactgcattgtctttggcattccactgccatccatgtactgtgtgagcctaatatatgctatgcaggcggcatcatcccctaccagatgtacatgagggtttagaataatagtgtggattggtttattgcttttggacaaagcattttcaaagtagaatcggtgaaaatccatcccttccactaaattacccaangcttcaggttcaaaagcagtaaggcctgggtcacagatttttgtgtaggcttcaaagtccccattgttgatagcttcgatcagttgttcagtgactttgataatctcttgctttcgtgctttcacatcttcatcctcaattgttgtatttgaactctcagttgactcctttactccatctggtttcttcaacaanctcttggctgctgagaaattccttgtagccagcatagttgtcaagatggcaccctttagttttcttctagcattaaatttcttcaagcagtctacagtctcctgtctgtgcatcatggaagcaacagtagaacgttgacagatccatgggtgcttcagtgcctctgaggctgtgatgcgtttggcagggttgatagtaagcattttattgatgaggtctttggcttcaggagtcaccgtgtcccattctggtgatggaaaatcataagctccagccttgatctgctgatagagtctgtgttggtcttcatcccagaagggtggataccccacaagtagaatatagagaatgacaccacatgcccacatatccactggctttccataaggatctttacgtaaaacttctggagaaagatatccaggtgtgccagcaaaanccaaaccacgcctgctggtccccttgaacttctatggctaagccaaagtctgccaatttcacagctgctcccttggatttgctagctaaaagcaaattctcaggcttcaggtccctgtgaactatgccatttaggtgacaatgattaacactttctagaatctgctgtatacaatgactggcatcagcttcactgtagtattctcttgccactatgtcttcaaacagttcacctccagtaactaaatcaaacaccaagtagtgaaagccctcttctgatatgctatcatgaagtcgcacaatattagggtgcttcaaaagacggcagattctagcttctctttctagtttctgatgatccctagcagaaagctttttggtgttgataattttggcagcatattcttgtccagtaggaattttcatacatcttctcaccactgagaatgccccctttccaagctcctcgaaaagctgatactcgtccgtgaacctggtgcaggttgtggtcgaagccatcctcggtccgggctgtgccctggctgggagcgcgacggaccagaagcgagcagacgcgcggctaaccccgggactggccccgcggcgctgtcacccagggccgctcttactttcntggtccnaaagtagctngcccgcnagggagtgtgcgcaggggcgggncggnangggagatgaccagaaaggntgncnngggntctcctccccacagtncgccgatcctcnctcctcctgcgggcctcgcttccttcttctccactggacgctccacccgccccttttccagtccctgtccccanatgcagggggtaaagtactcaagaagagggggccgggaaatggnanancagccaggcacgggacgagtggcaagcagttgcgaaacgatccgcactggagcaggaggagtagaagcagagggganggantccgangggnnggnaggtgngantngcannngggnccgaggccncgnagcccagagcggacagccnnagcccagcggccgctgntcagcaggctcaggcgcggggcgcgccggggctccgacgagcgtgcgcgcccgaggccggcttccctccggcgggcggcagcggctccggcgaagcgaggcaccttggcggcctcgcgctgctcacgagcccgcgcggcttcaagacggcgcggcgagagaaagagcgctcggctcaggcgaagcctcttctgccgtccccaggcctccgtctcctcctccggcgcctcctcccgccgctccctccgcctgccagcaccccctccctggcgaagccccctcctcgctggtcccacacctccctctagcgactccaagcctgtcccttcgtggatctctcgcactccctcctttggttgcacacacgagcacaccagtctagggagaaaccaggtgggtggaggaggatgtgcggnggagaagactggaggtttgggtgaatgangcgagaagtcacagttacccatttaaac

SEQ ID NO: 480 - DNA, 1929 bp, Homo sapiens
  modified_base (1088)..(1088): a, c, g, t, unknown, or other
  modified_base (1522)..(1522): a, c, g, t, unknown, or other
  modified_base (1525)..(1525): a, c, g, t, unknown, or other
  modified_base (1830)..(1830): a, c, g, t, unknown, or other
  modified_base (1920)..(1921): a, c, g, t, unknown, or other
ttttttttttttttttttttttttttttttttttttttgtatttaaatacttttattttcatttcacaaaaaaagcaacagtgtttgcagctacacatgcctttcagtcagtgctggtcatatgcaaaacaagttatcagaaatataaagaaaaataagccttttccctttacaagtgaaacaacacaatttgcatatacaatattatatatacatattttcaaaatgtttcacaaaagacagattatgatacaaatttagaattccacccacaagctcagactcaaggaattgaagatctctataggtgtttaaatataaaaatgtaatacctttacaagtttccaagtaactactttccaaagtatttgaaagaggctattcttcacagcaacatggaacacttggctttaatcaagacagctgtaaaactaagttttgtctcaatgtgagtttgttgattaatgcaaatgctccaattatgccataattctcattttatatacacatacatacacagcgtattattgtactgatggtttacacagtccaatttctggagcatttccttcagctaagccatgacctttacttcctttgaagtattttaaattaagaactgttcagaaatatcactaatgactaccatgactaactccaaaaaggtgcccttttttcttttatttatgatcaaatgtaaatgtgtcatgaataaacttatttttttctatggcagcaggtataagtaatagcaaagtataggctactttttcaacactagaatctgagagtttgatatacagtatgtaacatttctttgcaaattttctaggagttctatcactcaatgtttccaaaatagtaatatggcaaatcttcagcatggagtagtagtatcagaaatgggaaaacaaacaatgctaagaggcctgaaggaagggaggagagcagagagggagggagggaggatgtgtgcccatgcattttccctgatgcagacaaatgtggagttttaacatttaccatatggtagatgaggagacagtgtgatataagaatgcttaaagcgaacatacaggtctggatanatgatatgcacacaaaatacaaggctaatgaggcagcaatggcttaaatttgtgaatgccagtgaagaaaacacctaacagtataggcactaaagacaaaatggaaagcacacaatggagaacggaggagaaagatgcagtcacacaaaagacctctgggtaagaaagggccaacttgtcttgccacatgtgggggatgaaagatagaaaattccttttggatttagttttggggctcatgttctattcatcagagccatgtcaataactcgaaagggtcattccaagacacaatttctaccaggtacacaagctatgcaattgatggaatcataatagacttctatagatgaatcagaagtccaggcctcaaaaagaagctactcttaacggtttgcaaatgcgttctagacagcactcttattggcttatcngcntcgccggtttaccagttactaaaagatatatgagcaatgaagtttaaacacagctttattcaatattgtcctcttgcctttctagaatttacaaaagcacaggtcccttttcactacctcattcaatctgaatcaacataagaaatgctggatctaattagctttcacaactcaaccatagctgagtgtcttctcctgtcttatctgctgcacacctgttgctattagttacattaatacactgctacaccttccagccagatggcagggatttagtaggtctttatttttgttaggtatagtcnagaccccttgcaagggactaagtgttaaaggaaaataatggcggaagaaagaagcaaatgatatatatgcatctacacacttgcatcctnnatggaata

SEQ ID NO: 481 - DNA, 4136 bp, Homo sapiens
  modified_base (40)..(41): a, c, g, t, unknown, or other
  modified_base (43)..(43): a, c, g, t, unknown, or other
  modified_base (57)..(57): a, c, g, t, unknown, or other
  modified_base (66)..(66): a, c, g, t, unknown, or other
  modified_base (70)..(70): a, c, g, t, unknown, or other
  modified_base (106)..(106): a, c, g, t, unknown, or other
  modified_base (110)..(110): a, c, g, t, unknown, or other
  modified_base (131)..(131): a, c, g, t, unknown, or other
  modified_base (160)..(161): a, c, g, t, unknown, or other
  modified_base (341)..(341): a, c, g, t, unknown, or other
  modified_base (381)..(381): a, c, g, t, unknown, or other
  modified_base (508)..(508): a, c, g, t, unknown, or other
  modified_base (517)..(519): a, c, g, t, unknown, or other
  modified_base (716)..(716): a, c, g, t, unknown, or other
  modified_base (720)..(720): a, c, g, t, unknown, or other
  modified_base (846)..(848): a, c, g, t, unknown, or other
  modified_base (850)..(851): a, c, g, t, unknown, or other
  modified_base (856)..(857): a, c, g, t, unknown, or other
  modified_base (894)..(894): a, c, g, t, unknown, or other
  modified_base (946)..(950): a, c, g, t, unknown, or other
  modified_base (953)..(953): a, c, g, t, unknown, or other
  modified_base (956)..(958): a, c, g, t, unknown, or other
  modified_base (961)..(968): a, c, g, t, unknown, or other
  modified_base (971)..(974): a, c, g, t, unknown, or other
  modified_base (976)..(982): a, c, g, t, unknown, or other
  modified_base (984)..(984): a, c, g, t, unknown, or other
  modified_base (987)..(989): a, c, g, t, unknown, or other
  modified_base (992)..(995): a, c, g, t, unknown, or other
  modified_base (997)..(998): a, c, g, t, unknown, or other
  modified_base (1001)..(1005): a, c, g, t, unknown, or other
  modified_base (1007)..(1009): a, c, g, t, unknown, or other
  modified_base (1011)..(1013): a, c, g, t, unknown, or other
  modified_base (1016)..(1019): a, c, g, t, unknown, or other
  modified_base (1021)..(1022): a, c, g, t, unknown, or other
  modified_base (1024)..(1024): a, c, g, t, unknown, or other
  modified_base (1092)..(1092): a, c, g, t, unknown, or other
  modified_base (1172)..(1172): a, c, g, t, unknown, or other
  modified_base (1213)..(1213): a, c, g, t, unknown, or other
  modified_base (1238)..(1238): a, c, g, t, unknown, or other
  modified_base (1246)..(1247): a, c, g, t, unknown, or other
  modified_base (1283)..(1283): a, c, g, t, unknown, or other
  modified_base (1558)..(1558): a, c, g, t, unknown, or other
  modified_base (2048)..(2050): a, c, g, t, unknown, or other
  modified_base (2052)..(2058): a, c, g, t, unknown, or other
  modified_base (2060)..(2061): a, c, g, t, unknown, or other
  modified_base (2063)..(2064): a, c, g, t, unknown, or other
  modified_base (2066)..(2066): a, c, g, t, unknown, or other
  modified_base (2068)..(2069): a, c, g, t, unknown, or other
  modified_base (2071)..(2071): a, c, g, t, unknown, or other
  modified_base (2073)..(2080): a, c, g, t, unknown, or other
  modified_base (2112)..(2112): a, c, g, t, unknown, or other
  modified_base (2116)..(2116): a, c, g, t, unknown, or other
  modified_base (2177)..(2177): a, c, g, t, unknown, or other
  modified_base (2257)..(2257): a, c, g, t, unknown, or other
  modified_base (2261)..(2261): a, c, g, t, unknown, or other
  modified_base (2498)..(2498): a, c, g, t, unknown, or other
  modified_base (2501)..(2501): a, c, g, t, unknown, or other
  modified_base (2534)..(2534): a, c, g, t, unknown, or other
  modified_base (2540)..(2540): a, c, g, t, unknown, or other
  modified_base (2550)..(2550): a, c, g, t, unknown, or other
  modified_base (2558)..(2558): a, c, g, t, unknown, or other
  modified_base (2562)..(2562): a, c, g, t, unknown, or other
  modified_base (2676)..(2676): a, c, g, t, unknown, or other
  modified_base (2870)..(2870): a, c, g, t, unknown, or other
  modified_base (3114)..(3114): a, c, g, t, unknown, or other
  modified_base (3127)..(3127): a, c, g, t, unknown, or other
  modified_base (3137)..(3137): a, c, g, t, unknown, or other
  modified_base (3661)..(3661): a, c, g, t, unknown, or other
  modified_base (3675)..(3675): a, c, g, t, unknown, or other
  modified_base (3679)..(3679): a, c, g, t, unknown, or other
  modified_base (3681)..(3683): a, c, g, t, unknown, or other
  modified_base (3685)..(3691): a, c, g, t, unknown, or other
  modified_base (3693)..(3693): a, c, g, t, unknown, or other
  modified_base (3695)..(3695): a, c, g, t, unknown, or other
  modified_base (3697)..(3706): a, c, g, t, unknown, or other
  modified_base (3708)..(3708): a, c, g, t, unknown, or other
  modified_base (3710)..(3714): a, c, g, t, unknown, or other
  modified_base (3787)..(3787): a, c, g, t, unknown, or other
  modified_base (3793)..(3793): a, c, g, t, unknown, or other
  modified_base (3801)..(3801): a, c, g, t, unknown, or other
  modified_base (3842)..(3842): a, c, g, t, unknown, or other
aggaaactgaggcacaaagaaaagactgtaaggcagagcnngnatttaagcccaggncctggtccnttangttttgggggggttttgtttgttttacagactatantttnagagaagtagattgaggaganagctcattgaaattgttcattttctgtanngaactagaaggcctaatttcatttttatttttacttgtgtcaacttatttttagacttggactattgagaatcttatatgttgttcctaaagcgacacacctaacagcttcaaaaggactatattacagttgaacccatggtagtttggatcctactgatacttgatgaggatctttacntagtgttttatgttagttttgggtgatgtagttgagtccnccacttactgagtttacctactgtgtatgactgggctcaatgataaatagaatggttatatcaacactcaaatgagggctgacacacttcacctctccttttacttaagatctctctgcattttttnttttttttnnngaagccaagtaagcaagaagaaaaatgagagataatgcttcagtgagagaggaaaggtgctacatagagtatgagctgttaagttacatcccaggggaaagacctgggaactattgtattattctcttgaaaatttggcccagtaagctgctacatccagttcaactaacaaaatcctgtataccacagagaagaanaaanaaaaccaaactgacaaacatccttcttttatttaagaccaaactgcagctggaatacccagtacagttctgcttactacacttcaagaaagatctgaaagcggaaaaagaaccaaagaagggcagnnnanncgacnnaagggtgggtggaaggtgctgcagtatgaatactgtncgaatattttgactctggtctgaaaagataaaagaatgttatcgaaaactannnnnaanaannnaannnnnnnnaannnngnnnnnnngnatnnnagnnnnannaannnnnannncnnnttnnnncnngnggaaactaatccctaaatatgaataggtttatattgattcatgggtaacaggtccataataaattatnggaaactaggatgtctgaatatcaaggaagacagccatagtctcttacagtgcctctgttggtctgtctcaaactgaatngggtgggaaaaggtatggtccaatataaaagttccattttngccattattggcaaatcttgccttngtttattnnggtgccagtgttttctgcttaatcatttgctttgtnggcatctgtgtttatttacttgtacaccacatgcagtttacatctgtcttaactactccttcccaggtaaattccaattatatttgacatccagctaagagggcccatctcttctcacctctttcctagtcagtatattcagcaaatatttattgagcccttactgtgggcaaatcattgtactggataattgagaaaaatagataattcccttattcagtaaatgtctactgagcacaatctagtgaatcattacagtatggcctcattgtttngtttgaggtgtgttattcataacaatattttacaccattcgtatcaatgtaattatagaacacaatatacgatcaaggataagtaattgtgtggttatctgccatttaaaagtatccagtatttgatcacattattataaataatgaaaaaatgatttaatctgtaataaactggtttattgtgcagtgactgtaatatactagagttataataaattgtttactctgcctcaccaaacacatgctaggatataacccccaaaataagtatttaactttgcattaggtataaaggagactgggtgctataattagattattttgaggcagacagagagctgttatcctaactgatttagtatgttctgtaattgagaaaatgttcaccaaattatactttttagtgatttacatgtacattttataggggacatgttctgtgtatagcgaataaataacttttatagtatcacaaaaaaaaaaaaaaaannnannnnnnnannannanannangnnnnnnnncctatacattgatttcatcacatttgattttngtcntcttttttgccacatacttaaaactttccatataaaattaactaaaaatctggaagtggantttaagcttttaatttgtagcaattttgaaaatatagcagaggtatattttcaagggaggtgtgaaatggaggtattatngttngtattttattttagaaattttgtttgaacttgcccaagatcacacagcaagtgtcagatcctaggttacagcccataatttttcacttgtttcatcttttgttaccatgtttgttgtttaatccaatggggaagtgtttttatagctttattttcatggagatagtaacattgatataatgggatctagaatttacttagagtcaaagtgactagatttaattacaaaaagtatttngtngtataccgttatacactcattaacataggggtncttatngacagaggtnctatgtantttnaaaagaatatgtagaggctatagacttttttgccctctacctcccttctccatttccttttgaagttaagacatttaagggggagaattaaggtgcatattgagttggggtttngtttaaaaaaaattaggtaaatacatatataactacaataacaacagttggtagttctctaaaatatttaattatggtaaatcagaaaaggccctttaatttttgcatctgttgaatgaattgctttaggatctcttctgtggttgtttctctttatactgaatgctgtcaatattattgagcacttactgtgncgaaccatgtgcttttcaaatatttctatttaatcctaaaaacactcctgggaaatgggtattattcccattttacagatgagaaaattgtcctttgtagaatacccatcatgtgatagcttcttgcatattatgctattcatttctcacaaccttacaaggtaaatggataatgttcctggatgagagattaaacgtactcgaagatcttatggttgtgtggctcagagactctaagcatggntttccaaatctcnattctcttgntagagattttccattgtattgcattttgaccatgttcctgtttacaaaacctaagattatattctgaagtatctgtgacttgagtgatagctcaggaataatctgagggcattctattaggaaggaggactagcaaagcctatagttagcctatcctaggcatgaactattctcattttagataggatgacttgataaataggatgaagtgagcaacctgtttgtcttcggttattggtatctacaagacattctgctagtcactgtggaaaagtttccttctcttgggttttttcctcttccccttcctcttaacagtgttggttatctttattatgtttctgtgtatttgtaacagctgtttcacccttgtattgcataatggggatttttcttggaataaaaagtgaggcatgtaaattcattgagaactaaccgtagtttgtaaagaagtaaaaggcctttgtatctagttttttgcagatcacatttctttgaatgctggaaagtgaaataaactggtntaggagccaaaaanaaanannnannnnnnntnanannnnnnnnnnanannnnnaaccacctgggtacaactttttcctaatttgtgtaagaggttttagagatgcactctgtccctcttgctttancaaatngcctacangaatgcaaccaaaatactagaaactgaaacttacacaaaanctttcaggttttttcctgtgttgtagttctagggaagaggatagtttattagtatttattttaagcttaaggataggttttggacctggattccatcatagtataactgccatcgaaaagaagacaaattgaaattacagcatttacctaaggttcacagtatggctgacttcagcagccttacatggtaagttctctgtaccagctatttttggttctcgcaattgcatcgacttgggaaattcctatcaccattctctatataggctaaccaaaacttttatcagtaccttt

SEQ ID NO: 482 - DNA, 1856 bp, Homo sapiens
  modified_base (31)..(34): a, c, g, t, unknown, or other
  modified_base (460)..(460): a, c, g, t, unknown, or other
  modified_base (657)..(657): a, c, g, t, unknown, or other
  modified_base (1529)..(1529): a, c, g, t, unknown, or other
  modified_base (1617)..(1617): a, c, g, t, unknown, or other
  modified_base (1631)..(1632): a, c, g, t, unknown, or other
  modified_base (1675)..(1675): a, c, g, t, unknown, or other
  modified_base (1682)..(1682): a, c, g, t, unknown, or other
  modified_base (1694)..(1694): a, c, g, t, unknown, or other
  modified_base (1740)..(1740): a, c, g, t, unknown, or other
ttttttttttttttttttttttttttttttnnnntacaagactttgtttattaataaagtaattcattatgacttttgaaaaaaaaagttttaaaatgttctgtgtacatgtcaatgtaggttaggccagccaaaagacaaagcaaagcatcaacattaagtcacaggctaggattatacaaataagaacaaacacaaggcttatggtacttgttaggtaaacacaaccaaactaaactgtacttcaaatttgtttatataaaagcatattaaagctcactttaaaatagtgtccatcttttcttttaaacgggcatagactcatttgcagtcatgtacaaatatacctaatagctttcttcatcttttaatacaagtacaattccttgcttctttatgcaacctaacaaaataatatagaatgaagtcattagaaaaatatgaacctttctgaatctanattacatttttaatttaaattggaaaatacagtttagatcatatgaaacatatggatttcagacatgtattatctgtttctaacagattattacaggcggtctttattttggctgaaatgcaaaaatatgactttcttaataacagattagttaaaaatactttccattgatagcagtgctagtccctagaacaaanggtaagcaaaacttatttgtaagttactgcctattcaatgcccagaatatgtagatcctaaatctaagcccttaatatacatctactttaaagataactgaaagatctcacatgcctgataatccttaatttaaaccgtcctgtaaacatagtcaaaatctgctaatagaaatacaattcaagtaaacattgcatatttgatttaaaccaccttacagttaaattcactcatgacacattggatcataaccactaatatgtaaaaagttttaaaaaaatcatccttacgtatagatgaaaataaactttgtaaacttgttcatttaaaataacgaatgtactgcagctgctctttggtttggcatagtttcaggtactgaatattcaagtaaatttgttcccaggtaaaccaagtctcctaatttgtctgtaatggcaatggcaagacctgaacttcaactttatttttcttaaggtgtcatcacaaagtgtttgaaggaccaaagatagtacttctaaaatttgacagggcttcattttgattttttctccccaaatagttgatagcaataatcaataccagttgagataccaaagaggcagcctttccctgattcccacaccacttgtaggcctttgctagaatggtcattaatacgtatgaatcagttgagctaaatattatttagaacgtggcaaaatgctggctgtaaattaaatcaaagataagtaattcaaaggctttaactgaaaatttctgaaaagatgtttgctgtgctattaaagatgttaaataacaaaaattaaaagaactgagaaagactataccatgaaagtgcataatagtgaagaaaaaaatgaagttcccttgncgttagccaggtgcatgcaaatctttttatctgaatgtagaaatgcaaaaagtaccaggagaacatttctgaaagtagtcaagtatgntttaacatttatcnnccttataatatgcaaactgccaaactggagttatgtttttagntggtaantgatatatatanatatttttgagatggagtttcactcgtcgcccaggctggagtgcanaggctttccgttttaaaaaatatatcttctgttatacttcagttatttcattccactgatcattttcttgcaaatgaaaattgaaaataccagtctataatgttttcatacaccta

SEQ ID NO: 483 - DNA, 3145 bp, Homo sapiens
  modified_base (486)..(486): a, c, g, t, unknown, or other
  modified_base (488)..(490): a, c, g, t, unknown, or other
  modified_base (493)..(500): a, c, g, t, unknown, or other
  modified_base (506)..(506): a, c, g, t, unknown, or other
  modified_base (510)..(511): a, c, g, t, unknown, or other
  modified_base (513)..(513): a, c, g, t, unknown, or other
  modified_base (1055)..(1055): a, c, g, t, unknown, or other
  modified_base (1506)..(1506): a, c, g, t, unknown, or other
  modified_base (1674)..(1674): a, c, g, t, unknown, or other
  modified_base (2243)..(2243): a, c, g, t, unknown, or other
  modified_base (2258)..(2258): a, c, g, t, unknown, or other
  modified_base (2260)..(2262): a, c, g, t, unknown, or other
  modified_base (2265)..(2272): a, c, g, t, unknown, or other
  modified_base (2274)..(2277): a, c, g, t, unknown, or other
  modified_base (2280)..(2280): a, c, g, t, unknown, or other
  modified_base (2765)..(2767): a, c, g, t, unknown, or other
  modified_base (2770)..(2776): a, c, g, t, unknown, or other
  modified_base (2778)..(2781): a, c, g, t, unknown, or other
  modified_base (2896)..(2896): a, c, g, t, unknown, or other
  modified_base (2928)..(2928): a, c, g, t, unknown, or other
  modified_base (2990)..(2990): a, c, g, t, unknown, or other
  modified_base (3087)..(3087): a, c, g, t, unknown, or other
  modified_base (3089)..(3102): a, c, g, t, unknown, or other
gcagccctagcctctccgcacttctcgtcgctcgtccgtgttcactccacgcctggcctcgggtaggagccgcatagcgccaacggttgcgggtcgcaactactcccaggcggcgcgccttgcgcgccgggcctcccaggaccgcggcgagttcagaaggcgcggggagagaagtgaggtcgagcagcgggcggcttttgacgaacggccctcacagccaatgggaagcccggtcgactttcccgcccctgccaatagggagcagaacccgggccggggggggcgcttcccgcaggctgcggctggattcgatcctgcgcgacggccgcgaaggcgggggcggaggctcggcctgcgcggctgggagcggcttaggggaggagggaagaccggaagccacggttgcgtccccatccttagattcgctcctccgggcagggagcggagacggaggaggaggagggagaggctgaatgttggctcggnannngannnnnnnngaggancggnngnacgagagccaggccaagcgtctcaagaccgaggagggggagatcgactactcggccgaggaaggcgagaaccgccgggaagcgacgccccggggcgggggcgatggcggcggcggcggccggagcttctctcagccggaggcaggtggaagtcatcataaagtttctgtttcacccgtcgtccatgttcgaggactctgtgaatctgtggtggaagcagacctcgtggaagcgctggaaaaatttgggacaatatgctatgtgatgatgatgccatttaaacgacaggctctagtggaatttgaaaacatagatagtgccaaagaatgtgtgacatttgctgcagatgaacccgtgtacattgctggtcaacaggcttttttcaactattctacaagcaaaaggatcactcggccaggaaatactgatgatccatcaggaggcaacaaagttcttctgctctcaattcagaatccgctttatccaattacagtggatgttttatatactgtatgcaaccctgttggcaaagtgcaacgtatngttatattcaagagaaatgggatacaagcaatggttgagtttgaatcagtcctttgtgcccagaaagctaaagcagcactcaatggagctgatatatatgctggatgttgcacactaaaaattgaatatgcacggccaactcgtctaaatgttattaggaatgacaatgacagttgggactacactaaaccatatttgggaagacgagatagaggaaagggtcgccagagacaagccattttgggagaacacccttcttcgtttagacatgatggctatggatcccatggtccattattgcctttaccaagtcgttacagaatgggctctcgagatacacctgaacttgttgcttatccattaccacaggcttcttcctcttacatgcatggaggaaatccctctggttcagttgtaatggttagtggattacatcaactaaaaatgaatngttcaagagtcttcaacctgttctgcttatatggaaatattgagaaggtaaaatttatgaagaccattcctggtacagcactggtagaaatgggtgatgagtatgctgtagaaagagctgtcacacaccttaataatgtcaaattatttgggaaaagacttaatgttngcgtgtctaaacaacattcagttgttccaagtcaaatatttgagctggaggatggtaccagcagctacaaagattttgcaatgagcaaaaataatcgctttacaagtgctggccaagcatctaagaatataatccagccaccctcctgtgttttgcattattataatgttccattgtgtgtcacagaagagaccttcacaaagttgtgtaatgaccatgaagttcttacattcatcaaatataaagtgtttgatgcaaaaccttcagccaaaacactttctgggctattagaatgggagtgcaaaactgatgcagtagaagcccttacggcactgaatcactatcagataagagtgccgaatggttccaatccctatacattgaagctttgcttttctacatcatcccatttataagaagagaagagcatgttagaatttatgttcacctttattacaatttcaaagctacacttcattaaaaaaaaatctaaaatggttgatctcatgttgccttgcttactttaagatcctgttctgtaataaacatattttgccttgagtaaattngttgtaagcttaaanannnaannnnnnnnannnnaanatagaatatcataatgtagactatctacagcttcattgtagattatacagatatatgatttctaaccttattactggaatttttcttccacagtaaaaatatatttgcattcttaatgctaattatctgcaagtattttttcattgtgtaagagattaatgcaggtgaaagtattgcattttaatatagaattcctattatatgtttagatgtttaagtatgttgcagttactcatattaaacataacttgtatatttattattttaatgaagtttgagaataacgttacatatgttgaattttaagtactacagatttaactgattttatatttctgaaaggctaacagacatggatacacgtgtacagtatgcattcaaacttatttaaattggtgtatttttttttaagtcactgtccatttgtattgacatgcctctgtttctagtccagtttggagattttataaagttataacaatgannnaannnnnnnannnncatttgttgcatgtgacttaaatacagctagtatttggcattgagattttaatagaggttataattaacagttcctcttatagataataatctgggatccatgggtgggcttcanagaatctgtgtaccccctaaaattgtatgtanaattttggatatttacatttttattttttaactcttggatccatcagtaatatgtatttttntatatggtacaagatttaaggatctaattttatttttattccaaacagatagctatttgtctcaataccatttattaaacattctttctcccactgnannnnnnnnnnnnnnttttttaagataatagattttatacataggcaagtaagattta

SEQ ID NO: 484 - DNA, 2044 bp, Homo sapiens
  modified_base (13)..(13): a, c, g, t, unknown, or other
  modified_base (71)..(71): a, c, g, t, unknown, or other
  modified_base (218)..(218): a, c, g, t, unknown, or other
  modified_base (262)..(262): a, c, g, t, unknown, or other
  modified_base (298)..(298): a, c, g, t, unknown, or other
  modified_base (477)..(480): a, c, g, t, unknown, or other
  modified_base (482)..(488): a, c, g, t, unknown, or other
  modified_base (490)..(493): a, c, g, t, unknown, or other
  modified_base (495)..(495): a, c, g, t, unknown, or other
  modified_base (510)..(510): a, c, g, t, unknown, or other
  modified_base (512)..(512): a, c, g, t, unknown, or other
  modified_base (514)..(522): a, c, g, t, unknown, or other
  modified_base (1492)..(1492): a, c, g, t, unknown, or other
  modified_base (1547)..(1547): a, c, g, t, unknown, or other
  modified_base (1550)..(1550): a, c, g, t, unknown, or other
  modified_base (1566)..(1566): a, c, g, t, unknown, or other
  modified_base (1568)..(1568): a, c, g, t, unknown, or other
  modified_base (1570)..(1571): a, c, g, t, unknown, or other
  modified_base (1575)..(1576): a, c, g, t, unknown, or other
  modified_base (1606)..(1606): a, c, g, t, unknown, or other
  modified_base (1813)..(1813): a, c, g, t, unknown, or other
  modified_base (1860)..(1862): a, c, g, t, unknown, or other
  modified_base (1864)..(1866): a, c, g, t, unknown, or other
  modified_base (1869)..(1877): a, c, g, t, unknown, or other
ttttaaatcaatngataaacatgatttattactttgtctattaaagtagtttcaacacaattgaagtttanactgcactgggctgttcccatcacagtccaggattatgcacagaccagcccccaaccccagcaggggtgccctgccagaacctgtgctggatgcctaggagcacagagaccactgcccgttgttgggctgcgtgtgcacaattcatnccccgatccataatccctaagacaagaatggctgtcattgcccntgggttcactttctattcaaagaggactcatttggncacagccaatgtagtagttaaaatgcattttgagaaaaaataaatattctgtacaatgtatttacaaggatcaaatgttttgtaacccacccccaattagtttcccaattgggaaactataatttgataattaagaagcatattattggccgttagtgtcacgtcaacaaagaatgtgnnnntnnnnnnntnnnntntttttgaactatatntntnnnnnnnnnttttacgcaaaatttcacattttaatatgcttagaaggagtttttaaagaagtagaaatgatttccttggcctctgactttcagtgatgaaaatgcaaccatgcagtcccccctttgcagaagggcagttcttcccaggctttctggaagcaggggcttccgaggagtctccacccacctcacagaacactcactatgagccctgcacagacagcaggattcacaatctccaatagggatggcaggggcagcccttaaaacttgaagaggtcgatgaagtgctgcggagacacaggcgtgaagcagctgtcagggtcggccgccgtgcaggggtgtcctgagtccttccaaaagagaatgctgcagtgccgacagaaatgcagtgtgtctccgtactgctccttcgctgggtaatgtttctgaagtgcaaagtacatcaacttccattcaatatgacctttttctgaaaggatcaaatgtctacaaaactgcttttcagcaaaatggtactgacaaagcttcttccacagctgtctgtcttcactaagcatatacaacgtgggggtcacctggcctaaggtgatgatgtcccatccgtctgagaaccggtataggatgttgttcagcatgtgcagaggaaggtcactgagggtgaggccattgttcacttgcttagtcatctgaagatcctgtagctgttgttgccaggcgagaatagtttctaatcggcaaatccaaatattgatgtttcccactaatacagacttccctactcctctaataagaatgcagagggtagagcttaggtcttgcagaagatctttgattaagcgaggattgtggtggtcatcaagaaccttttgaacgattttatccaaaatgttgaagtaattcttctgtgccacgccactcaatgaagttaactgggattttgcaattagctgcaacagtttgaccacataattgaacnttcggatatcttgaattgcacttgagaagtctaaccgattaaaggcttctcccanggngcaatagccatgcctntngnntatnngtgtcatttctaaaatggtcctttttcctntttttcgatgcatattcatgctcttcattattgaatatttctccatcttcactatttaagataatgctgtgactgatgttacaacggttattctctctttcaagtttctgactacaagattcacatctcttccagccatcttctgtcttaatccaactccatccaggagatctccagtcctgacccaaaaatggcatagttctcctngcgcgcctgcggcccccagtcttcacctgacgcgcccgcgtcccccnnngnnnaannnnnnnnncggccacctgggcccgcacctgacggcgaccaggcggttattgccggaagtgggccgccgcctcccggcgcgcctcagggaagccccgcccctggccatgctgattggccggcgcggatccgcgtggcaatgttgctgcctggtcctgtcgcccgcagcgtgcgcct

SEQ ID NO: 485 - DNA, 2195 bp, Homo sapiens
  modified_base (9)..(14): a, c, g, t, unknown, or other
  modified_base (16)..(16): a, c, g, t, unknown, or other
  modified_base (440)..(450): a, c, g, t, unknown, or other
  modified_base (1034)..(1034): a, c, g, t, unknown, or other
  modified_base (1453)..(1453): a, c, g, t, unknown, or other
  modified_base (1661)..(1661): a, c, g, t, unknown, or other
  modified_base (1798)..(1798): a, c, g, t, unknown, or other
ttttttttnnnnnntnataaatggagtttttctttattatatcatatttctaaatcaaggaagctgaaattatatacttaaatatactctggtcaaaatatacatgaaccacaaatattaacttctacctaccaacaatttacagttatgttgtatgtggaatttcattcttgtcagaactcacaatggaaataaaatttctattatgggtgagaagatgagggaaagaattaaggggaaaaaatttggacagcacacacttttctttcattccaaaggtgccagtcagaacacagatccatggagttccacatctagccccaggctaccaagcattaattcaatgtaaatggtgtcactacaacatcaaaaagagcagtgctaggcagaggattttgtataaaatcatctaaaactctgaaaaactacaaaagcatctnnnnnnnnnnnttaggtaaaagcaatggagtttatttcagtgaaattattttaaattagatatgatatattaagctcccatatgccccaacctggtagaaaagttcctctcagtgagaaatcatttattttaatggcaaaatttttacatatcagtaaaatctgttatacttaaaactatgtatacagtacatttctggcaaaaaaccttatacatctttcagttgtcaagacaaagtaaaaatatggttgcataaagtcacaaaaaatataaactgctgaaaagataataaaaaaagattaaaaatcatttgcattgcctcccttacctcttcaatattagtaacaatttgcaaacaacaaaaaaattgtgaaaattctgttgcaaccttgacacacttaaccaaaggttgtcatttcaaatatcctagcttaaaaaagaatttactgcaattgtctgtgcatttatcatactatttatagaagtgcaatatttaaatattttcaaaataaaacacagtaactaaaatgaatcacaataacttataagagaagcaaagtttacaaaattaacaatttttaaaaggtcctatttnaattggttcctccttttcttcccccctccccacaacagcgtatatagcgccattacttaattccatatacaaatttgtaactttaaaaatacagtcttctgttaacatcaggaacattatgctgcacttagagaccctaagtaaaattagaatcccctaaagagagggccacataaaaagtaaatacagttttgaactcatatttaaatggaacttctattactttgtacagctttcaaattagaagttgaatagaacaagccctggacaaaaagcagcaagatttttcttttgaattcagtgcatgattctagaagtgcttgagtcaaatctactagagtcaccatttatgcaagctatcatgacatttgagttcattatcatctggttacataagtgctcactgtatttgccaaaantaatcctaaaatatgattcttaaaatagaaaaaatatagctctgttgcaatgggaaaatgattaatacaaaaaaatcaatttcttaaagttaacataaggcaaatataaatgatacaatattatcatacacgataccaattttatctgaggtgactacatcttcatttacatctattgtgtgatgcaattaagaatgacaaaaaaaantatcagtgtaaatcagaaatcttaggaaaatccagtatctttaaaaagtaatttaagcccaaaacaaatgtgaccacttattaatagaattgatttgttccatattttatcaaaataataataatgttatatccaantaaagagttataaccaagtgtcatatgtaaactttaattggatcctagtttgaaataatcagctataaagaaatttggagttaacttcagaaatttaaatatggcttgattagatgatattggggaattattacttttacaatggtattacggatttttaggagaatgtcattatctgtaggagatacttgaagtattttcacggtgataagtatgtctgtaacatccaaatggttcagggggaaaaaagcatatatacatacacaaacaaacacatatatgcatatatatgcataactagctgtatctatacatatataggtatagagaaaacaaatgacaaaacattaacaactgctgaatctaaatggtagatatacatggactcaggtggtgt

SEQ ID NO: 486 - DNA, 2254 bp, Homo sapiens
  modified_base (175)..(178): a, c, g, t, unknown, or other
  modified_base (183)..(186): a, c, g, t, unknown, or other
  modified_base (415)..(417): a, c, g, t, unknown, or other
  modified_base (420)..(421): a, c, g, t, unknown, or other
  modified_base (424)..(427): a, c, g, t, unknown, or other
  modified_base (429)..(431): a, c, g, t, unknown, or other
  modified_base (433)..(436): a, c, g, t, unknown, or other
  modified_base (438)..(440): a, c, g, t, unknown, or other
  modified_base (442)..(442): a, c, g, t, unknown, or other
  modified_base (444)..(444): a, c, g, t, unknown, or other
  modified_base (454)..(454): a, c, g, t, unknown, or other
  modified_base (497)..(497): a, c, g, t, unknown, or other
  modified_base (589)..(593): a, c, g, t, unknown, or other
  modified_base (596)..(604): a, c, g, t, unknown, or other
  modified_base (606)..(608): a, c, g, t, unknown, or other
  modified_base (1086)..(1087): a, c, g, t, unknown, or other
  modified_base (1107)..(1107): a, c, g, t, unknown, or other
  modified_base (1372)..(1372): a, c, g, t, unknown, or other
  modified_base (1443)..(1443): a, c, g, t, unknown, or other
gcacaggacatctggagcatctttgaatgggccattactctgggcatcacagggaataaacaggaaaaccagacacaggaactccacagtcattcagccactttgtacagggacaaatatttcactctactggaatagtcccagggctggggagtcggggttagggtgctggacnnnncatannnntgcccaggaatagactgacagtctgaatcaagatgaggtttaaagcctcttttggtaagaggctggagggttcccaaaagcatttttaaaaggctgttacaaaaatacggacctcttactacaggaaatttcatttacctggaaaattgtacagtgagcctcactacctggcaatgctacaatttaacttaactgaatggttacctcatctacttaacattcatagctnnnttnnttnnnntnnntnnnntnnntntnttaaataaanaaatttttatttaagaactgaaaaagacttttttgaagttaanattttagaaatatttaagcgtttatcataaacattcacatacatttatctctgtaaagtggcccaagaacagttatttcccttatttagaannnnnttnnnnnnnnntnnntaattaaactttgattttattatgtacatggatactattaaaaaggtgaattcgtgaaattttaagattgtgtataacacataaaagtcaaacttctaatttggtaagtaaataatcctaaacttaacacagtggttctttaaaatgtttaaatatttgtcttagatgctgaatatagacaaagagaactgtcatcttaggagtaaacacactataactctgtaaaaagaaatcatagaaaagtaaggtagtatttctcaaataagtcctcccatgctaaaaccacagtgacgcgcagacactagcctagaacctattccagtactgcaagtactgacaggctgcaaacaccagtaacaacctgcctggagccttgaccttgaaaacaaatggctgttgtgaactgatgtgaccaaaccaagagatggttccttacaaaaacaaagcaaaacacaagatgaaaatcaagcagaaaaannaaataatataaccttatttntgagaacacgacttcatctcaaaggatactttttgtatattaatcctcacagattaataagagcagttaaaataattttgtgtagatccagaatacaacaggtgactaagttaatgactaacacaatttacagacttcaaaatgataatactgaattccaaatttcacagcataacagatgactataatatactaccctaatcaactcttatttagtgtctatacagcatctacagagctcttcatccatcatatttctcctctnagactttctgtgttcatgactcattttcatccatttctgtcggagaactgctttgggaggagcagagcgantaagtgccatactccggtatgggcctgtgtggtggccagttgttttcttgcaagagtgatcttggagataaaataaattgagtctcaaaaaattccaatgactcgccatcttccttctccatcagaaactgatactctccgaatctgaccatgcacctgtatggcaggtccattttatttaggtagcccagctctctgctgtccacgatcagattggtctttttactcatattttttatttcaaaggagagaactgagctgttgaattttttaaacagctgcagagaaaactgaactcgggaaacctgtttgtcctgaaaagtataatgacagatgttggaatttcggccaaatttcaccacttcgctggaagggagtttctctctgttaaaacttattgactgaaatattccacactgcaactggccaggatggtaaaccgtcatctggagacaagttactgtctcttctgtgtcagcatcttcaaaactggtcatgatgtgcacaaggcccacctggggctggggagtcagtgaactctcttcagctgttcggctctcccggctcagagcgaggggaatcgaggagactgggcgcaggatgggggtggacacccggccgctgctcctccgcgcgggtaagtgtgagccccggggtgcggggaaccgagccagggaccagtgaccgcgagccgccgatcctcccgcgctcccgcgcgcgcggcctgccttcccactggctggcagagcacgtcctctcgcgcccggggcctttgtaaagagcgcagcggtggcgcggaggttttcaggcc

SEQ ID NO: 487 - DNA, 1846 bp, Homo sapiens
  modified_base (65)..(65): a, c, g, t, unknown, or other
  modified_base (566)..(566): a, c, g, t, unknown, or other
  modified_base (574)..(574): a, c, g, t, unknown, or other
  modified_base (591)..(591): a, c, g, t, unknown, or other
  modified_base (909)..(909): a, c, g, t, unknown, or other
  modified_base (1247)..(1247): a, c, g, t, unknown, or other
  modified_base (1417)..(1417): a, c, g, t, unknown, or other
  modified_base (1420)..(1420): a, c, g, t, unknown, or other
  modified_base (1456)..(1456): a, c, g, t, unknown, or other
  modified_base (1479)..(1479): a, c, g, t, unknown, or other
  modified_base (1525)..(1525): a, c, g, t, unknown, or other
  modified_base (1543)..(1543): a, c, g, t, unknown, or other
  modified_base (1557)..(1557): a, c, g, t, unknown, or other
  modified_base (1626)..(1626): a, c, g, t, unknown, or other
ttttcaaaaagaaaaaatttcactttaatccagcctcacccccacatgtgtgtttcacacagacnttattttttaaacagagtttattgtatttaatacattataaaatttgaaaaattgtaggaaagcagcagacttgaactggagcaattctaacaaggaataattctggccccttggcaaaactgatcagttttaaaacaaagtaaagttcacatctgtgaggtggacaaaaaagtgtgacttctgtacaaactacatttaaaatttcatgtctaacatctttgcaatgtgctcatgagggtttttctgaagtcctgcctggtccctgcctaaagaaagacgtggaacctccatatacaaacaaacttgattcaaggtgttttgtttgttttgtttttttaaaaaaaaaggaaaaagaaagacaaaggaaaaaagaaatatggatggctgttgttggcaatggaaactgtaaggagactgtgtcctcaccactcatggcttgtttatttgtcagaggcctcgggaggcccaggacacttcacggccatcacagcaccaactgncggctgtnacctttttttttttttnttttttgcatttcctaccttttgacatatatatatatatttatatattttttacaccttgaggatatcactattccaattgttcccatatgaatacaggtgtggtctctattggatataaatgtgtcttttattcgattttacgtccaggacttggtttgctgtcccaactgcacataaatgtcccttttttgtttgagttattggttgtgtgtgttttcctttttgcataagaaatatgtccatttagtccagaggctcttgctttatccggatgacggagggtacacggggcgtccgcctcagttcccgccgaagnacgtattcgctgaactgggacgagtctactcctcccccacaggagcccacgatttcaaatcctctttgctgcaacctctcgaggacctggactgagttgaggtgacagtagccatttagtggaaacctgatgacgtgcgtcgagtcgtgattccagcctgcattgacagagttacacatcacgtcgccgatctctggaaatacttcttctatcaaggatttgtcaccgcttagcgtgatcctttctccgaggtctggggccacacgcacgacgaggcactcacagggccttgaaaatcgaccagtttctctgtcctgcttccatctttccatctccancaacatgggctgaagctgaaaatattttgcctcttcatataacaaagtgtagtccttgaaatcatcaggaatgaggagtttggatgttcgtagaaaattcaagatatatctgaacatctgtccatctctgtcaatgaaatagtgctgtttgagactgtccaaaacaatgngcnctgtaccatcaaaaagtcttccgattctggattcanggtatttggtgagggtggccagnctgctggtgtacatgtggccgcccacatcaatgtggacaggcgcantggattttgtgagttgtnctggagtagggatnccttggttgttcagtggagatgcaggggatctagtgatcagaggtcttgacatattgggccgactgtcntttggtgatggatttgcctttattcatctgcaccctccatcccagttggtgtgcagtgcaggcttgaggagaaaaagctagtgacgggagctgtagtcccagctactggtgaggcaggtggtggctcgtgccgaattcctgcagcccgggggatccactagttctagagcggccgccaccgcggtggagctccagcttttgttccctttagtgagggtta

SEQ ID NO: 488 - DNA, 1100 bp, Homo sapiens
  modified_base (24)..(28): a, c, g, t, unknown, or other
  modified_base (288)..(288): a, c, g, t, unknown, or other
  modified_base (984)..(984): a, c, g, t, unknown, or other
  modified_base (1030)..(1030): a, c, g, t, unknown, or other
tttttttttttttttttttttttnnnnntttgataaatgtaatttttttttttttaaagaaaacacagaacaagtcctaaatcagacaaattgcacaaaagagagagaagaaaattgtaagcttcctgggagaggaagagatgtccatgagaaaaccaactgggatgagcctacaaaagcatgtccctctctctcctaatttacttagtctcaactgagcccaacaggagctggcctctgtcccagctgcaggatgctcccaaggcagtgtccaagagcctggaaggnagcttttatcagcaggttcagtacagcaggaaaagccatcctggcaaagagtccagtggtcctattagcgtaggctgctgctgctgctggcctgggagctgcccatacctgggtggtctggactatgtcgattcttctttttcttcttctctttcttcttccttttccgttcaggatcctcttcttttttctttttcttcttcttgtgatctgaatcagatggtgtttctggggggacaggatcctgggtacggctctgtttgtgcttgtgcttattcttcttcttgggaggctgaatatgcatcagacgacactgctccggcaacgggccagtgtggaggcggaagccggccagcatggtccctgtgataggattgaaagagctactgagaatagggggcttctcaatgagagagcggaggctgctgttatcatgggaaccaggcagatcaatcatccctggcaggtcaggcaggaagttacttagcttctccttcaccttcttcccacagaatttattataggcttgttccaagttgtagtgtgtgatcagattcgtgctgcctgtcagctctgtgctacctggcagttccctcatgaggtaaaaagggccacagccagctcctgacttgtccgcgccaggaggagccgtggccgcggtgggaggcggggccgtgccgggtcccccgcccgcanggaggcggtggcgggggtggaggctttcctggtccgaagccgagtncggttgggggcggtggtgggtcagcctgagccccaaacagtgccgtgaaattctccatcgtaccctccgc

SEQ ID NO: 489 - DNA, 1880 bp, Homo sapiens
  modified_base (89)..(89): a, c, g, t, unknown, or other
  modified_base (93)..(93): a, c, g, t, unknown, or other
  modified_base (96)..(99): a, c, g, t, unknown, or other
  modified_base (102)..(103): a, c, g, t, unknown, or other
  modified_base (106)..(106): a, c, g, t, unknown, or other
  modified_base (109)..(111): a, c, g, t, unknown, or other
  modified_base (115)..(117): a, c, g, t, unknown, or other
  modified_base (121)..(121): a, c, g, t, unknown, or other
  modified_base (124)..(125): a, c, g, t, unknown, or other
  modified_base (131)..(133): a, c, g, t, unknown, or other
  modified_base (136)..(136): a, c, g, t, unknown, or other
  modified_base (141)..(141): a, c, g, t, unknown, or other
  modified_base (145)..(146): a, c, g, t, unknown, or other
  modified_base (241)..(241): a, c, g, t, unknown, or other
  modified_base (738)..(738): a, c, g, t, unknown, or other
  modified_base (784)..(784): a, c, g, t, unknown, or other
  modified_base (910)..(910): a, c, g, t, unknown, or other
  modified_base (1553)..(1553): a, c, g, t, unknown, or other
  modified_base (1557)..(1557): a, c, g, t, unknown, or other
  modified_base (1559)..(1559): a, c, g, t, unknown, or other
  modified_base (1575)..(1575): a, c, g, t, unknown, or other
  modified_base (1582)..(1582): a, c, g, t, unknown, or other
  modified_base (1586)..(1586): a, c, g, t, unknown, or other
  modified_base (1595)..(1595): a, c, g, t, unknown, or other
  modified_base (1616)..(1616): a, c, g, t, unknown, or other
  modified_base (1645)..(1645): a, c, g, t, unknown, or other
  modified_base (1660)..(1660): a, c, g, t, unknown, or other
  modified_base (1678)..(1678): a, c, g, t, unknown, or other
gtggagatgaggtctcagtatgttcccaggctagtgttgaactcctgagctcaagaaatcctcctgcctgagtctctgaaagtgctggnattncannnntgnnccncannnacannncctnttnncacaannnttnacaancaanntatattttctaaaactatccagatttcattatcagggaaaagtttgcttaggtttattacagcagtcctttgcatttgtatggtaatttgtactntacaaatactttgatatattataactctattggtctttgaaacaaagcgatacagtgtaggtggtatcattctctttctcactcagtgtggcccagagttgctcagaattggagcagagcctgagacgtatctgcagatcctgtcatcagctggcaagtccaggagactgtgtcatttagagactgtgttgttagttatccctcaacatcttctaaggtggcaggaaataatattggaaataacattttaaagtaaaaattttaaagtttaaagaagagttttgccacttaaacaggggagctttgtctggaaaatacactgagttgaaacacttcatccttggaaggattatataagatgaacagttgtgataaatgtgtagattagagggatgtgaatgggcagttagtccagtgccctcatttaagaggccaagatcctgattcagaggaggcatcctttgcccagagctgcttagctaatctgaccaaatgtngggaaaaatgtctcacctaacccactattccttaattatggatttngtgaaaaacaatagaacatgttaatgagtaatttatattagttcgatgtattacaattttttagctttaaattacagttttcttataatgttgaaatgttttagaatcctttgaatctaagtattngtttcctaaatgaaacatttgtacaacatttgatgtttttacttatgaaatattctcctcccccaagaaaatttaaactttttctctctatttaaaagctaagaaatgttttaaaggaaaaatgaaattatcttcctttagcttatttttaaggtaaaacagctttttactctgttattgtggtaatggacagaatattacatacaaaaatattctgggagagctttttcctagttggttttaaatcattgtgccacctgaaaggtttttagattttataggagctaatttgtccaccagcattaatgtaacacagtgtagttatgaaaatatattgaaggacaggaagtggacacgaagtgatttttgtaacctgagcagttaatgaatgtgccaacattttctaggaagggacagcaagaatattctgctctgtagttaaaatactggctggcttttgatgtcttcatgcttaattgtgatcactttcttgcactgtgatgtttttacgtgaatatgttgaagtagaagtctaccatattattttataaaatgttttctgtatggcaataaactgaaaacatggatcaacccttcttttgaaaataaactgagtcaatttagccttttaaaaatatagtcnatcncnttttaaatagaatccntcttccnaccnatcaaggcntcaacattttgtaagcatccnaaaaaattggtaattagggggcttgcacntaaatttcactatcnttcagtagagaggaactntttggaacttagatttccaatgtgtatattctaatggagaaagcaagaggtagagtttgtatgtttgacttaccttagatttttattttccatacatactgcaaatgattgacttgttgcataaatgaagatcttctgttgtgtgcttttcaaacactgtaaataaatttgaaatttgaataactttccacagtataactgt

SEQ ID NO: 490 - DNA, 2154 bp, Homo sapiens
  modified_base (557)..(557): a, c, g, t, unknown, or other
  modified_base (779)..(779): a, c, g, t, unknown, or other
  modified_base (839)..(839): a, c, g, t, unknown, or other
  modified_base (879)..(879): a, c, g, t, unknown, or other
  modified_base (908)..(908): a, c, g, t, unknown, or other
  modified_base (944)..(945): a, c, g, t, unknown, or other
  modified_base (1742)..(1742): a, c, g, t, unknown, or other
  modified_base (1749)..(1749): a, c, g, t, unknown, or other
tttttttttttttttttttttttttttaaacataaaatgctggtacacatttattcttttattgctaaacatcaaatgccggcaattacgataccttcaagttaaagcttaagaatgaattacaggacagtcagaagatttatagaaaaaaacacctgtgcaccattagtatgtgaacattcaataaataccataggacaaagtgatgactgagagccacaatatctatgaagcacatgtttacaatttgctgttagaacagacaatgacctgtaagagcgattatcaaaaggtcaagtttaactgcatgtcttttcaaactgagatgctgaaaagaatatatacattctttacagattgtaggtgattaaaaaaaactgtcaaaaatgtaaacaatgcagagtaggaacactgagaataaagttttactgttgaacaaagtgacaacgcagaaagaacactttcttcaatcctcaaaataatccatttttccaatcactctacagaaaccacagtggattctttccatgaagatgataatatgccagggacacaangaccctccaagttatttttttatgtgaacatatatttacagtaaatattcaataatactttttacagcttacttaaatagaaacatgctttttctaatccataaataacactaatcattatccattcaactgcatttattaagtacttatgtctcatgcactgtgccagggatgcaaagatgaatatgatatggtccttgctgtagaagtgcccacaaccangctaaagaagaaaacacgtaacattttctttcttacataatgaggccggttttatacaantggtactgatctgctctttcctagtaaagtggttcccaantcctgatcctatgggtcaacagatcaaantgtttaacagttgaaataaaatgagatttgggtttnntttttttactcagaaaaataaattaatgaataagatttcctctattaaagttttttcttggtttttaaaaaagtgacttgcacatatacaaccttttcattagtaaaattgcttagttcatgcaatcaaattaattatataagtatttcatggcattctccaagctctactacttgaacaggtctgactgagcattactatgctaatgtactctgatcccaaatgattgtctacctaaaaatagaacaaatactgtattttctggaataaaccaataattcgtatggttttagtactggtattaactgatgacccaagtcattaataaaatgttaaaattatattcaacatctaattactgttaaggcaaatttgtaatacaatctaaaaagtttcttaaaaatgattaaaaagttttagtgcttacagagcaactcaataatctgaaaaaggtaaccccatggaatacatcactcagtaaagaagttggatagatggctattaatgagttattgcccttagtcacttctgagtatacaagagaagcatgtattttccatcaaagaaacagcaagctcatatactcctaggaccaatagcttcacactggcctgctgactccccaaatttcccagggctgcatctccactccaaaagacctcaaagcaggcgtggctcttctgggctcaagaatcagttcccaagccctggaaaatccatgtttgtactcacgtatagccattctcactatactaccaagtcttctgtggacccagagaggtagcttaggagagagncagaaancaaggactaggtacttaataacctgacacagaaaaacatgggagccgctggtgaggacagagtatggctcagagtttaaggtcattgcttcttggagacaggaacccaggagctaggccccagatgtcctgagcagctcaagagaaaatgtttaccctggaagggttccaagcttcaaagctctatagagaatgggaagtaggactgctgaagatcctctggggtgtcttgtgatctgtcaggagacccggcctagttccgaagttcaaccccaactgcctccctctgctcacatgctgctggtgtgtgatgcttcctgcagctcaccgtggatgtcaaagctagtgctgctttatgagggggcagagactccttataaaagatgcaactcttgtggggcaaaac

SEQ ID NO: 491 - DNA, 819 bp, Homo sapiens
  modified_base (90)..(104): a, c, g, t, unknown, or other
  modified_base (107)..(107): a, c, g, t, unknown, or other
  modified_base (112)..(112): a, c, g, t, unknown, or other
  modified_base (114)..(114): a, c, g, t, unknown, or other
  modified_base (120)..(126): a, c, g, t, unknown, or other
  modified_base (179)..(179): a, c, g, t, unknown, or other
  modified_base (329)..(329): a, c, g, t, unknown, or other
  modified_base (657)..(657): a, c, g, t, unknown, or other
  modified_base (663)..(663): a, c, g, t, unknown, or other
gaggcccccccacctcgcccggctcacacccccaaagggagggacccacattgcacacactgtaagaaatgcactttccgaggaaggggnnnnnnnnnnnnnnnatnggggngnccggannnnnnnagcttctcagccagggtgggggtcgtggagtgggggagggaggccagccgggnctccagaggggtcagggcgcgacgagaaccaactctttacctaactttgcatggtgcttagtcaaggactcctgcgacctggctcccgaggtcagctggcggcgctgacacacatgcatggcagactatccctggctctatctccctgtncctcgccccctccaccccccacttcctctttaaaaaaaaaaaaaaaaaaaaaaagatacaagaaaaacctttaaaaaaattccatgtttcctaatttgcacgaaattttctaccacaagatgtgccttgccttccgagaataagtattacctttaaacaatatcagcgcacacacatagctgcatgttctgctcgtgtagtttaaaaaaaaaaagacaaaacagtgacatgaaataaaaaataaaaattgaaaagggatgtatttctatttgtaaaaaaaataaaataaaaaataagaaagtgagaatctaaaaaaaaaaaaaaaaanaaaaanggagagaaaacaccacgctaaagattcagacgccactggagaagacatttggcgccccaggtctacgccagcccctgggtgtcctgggtcctgggttcccctcctggtggttattcagggggtggccccctgggtggctcagctttaccacgcccc

SEQ ID NO: 492 - DNA, 1344 bp, Homo sapiens
  modified_base (67)..(78): a, c, g, t, unknown, or other
  modified_base (80)..(80): a, c, g, t, unknown, or other
  modified_base (82)..(82): a, c, g, t, unknown, or other
  modified_base (84)..(84): a, c, g, t, unknown, or other
  modified_base (86)..(90): a, c, g, t, unknown, or other
  modified_base (92)..(93): a, c, g, t, unknown, or other
  modified_base (95)..(97): a, c, g, t, unknown, or other
  modified_base (99)..(100): a, c, g, t, unknown, or other
  modified_base (103)..(106): a, c, g, t, unknown, or other
  modified_base (288)..(288): a, c, g, t, unknown, or other
  modified_base (611)..(611): a, c, g, t, unknown, or other
  modified_base (872)..(872): a, c, g, t, unknown, or other
  modified_base (882)..(883): a, c, g, t, unknown, or other
  modified_base (885)..(891): a, c, g, t, unknown, or other
  modified_base (893)..(893): a, c, g, t, unknown, or other
  modified_base (1022)..(1026): a, c, g, t, unknown, or other
  modified_base (1215)..(1215): a, c, g, t, unknown, or other
  modified_base (1282)..(1282): a, c, g, t, unknown, or other
  modified_base (1306)..(1306): a, c, g, t, unknown, or other
tttttttttttccaagagatttacttcatctttattaacagtaccatagtattccactgtctagtannnnnnnnnnnntntntntnnnnntnntnnntnnttnnnnttgtttcaaatcttttattattagaaaagtgctgccagaaacatccttgccatgcttctgtatgtactggtgctagtgtttctatcagataaatttttagacatgaagtgaattactaggcataggaaatataatttacacttttgatagatactgagtttttgctcatttgctacatgaancagaggcagagtattctgtgtggggtttgggacaggaacactgacccctgaagtcgagcctgggggtctaacatagtggtcatttgtccagcctgttttatggaaggaactggactctgagctttggggaatttcctgcaagataaatgtatatcccacctatactggtaacaggtaagttatgcacaaagatgaaaagacaaagccctagctagatcagctcttgctctcagcactacaatggccagcggtaattctttcagttaaaatgacaattaatacagtttcattgaagcttcaaacagagcagccagatcctcttntgactggggacggggtgcaagcttggtgaccctttcctggggcagcgttcctttcactagtgcggggatatcagctttggagtaaccaacagctgctaggccatcatcaacatccagatcgaataagaatttccggagcgtgtctgccaacaccagccctgcatcttggatcctggcagtgcgggtgtcggctcccagtatttctgccatctccaggtgtcgctctggaaacatctgggccgtgaaagtgaacaccgctgnggacgtgagnncnnnnnnnangccatggggctggggagaaacgaaatgcggtgaccggcagatgacaaagctgttcttccctgcatattctagatgttaagttactttaccccatactctaagcaggcgagaattggcaaatatatttannnnnccagtgggtgatccacattgtaatcctttgctttatacatcttcactaaacctgaaattgggtaagacattccatggctagaaaagaaagaaaatccttatgttcatacacagttatcaaaattcaagtcaacaatagaaagatactcttatggggatgcctgtcacggcctctagacagtatcattanctgaaaaagtgatatgttctgttttcttggatataaggatatattatgatgtctagggacatgtagntgcattcattaacaaaacctctgnaaaatgctcaaattcaaatggctcataggaattgtatg

SEQ ID NO: 493 - DNA, 2032 bp, Homo sapiens
  modified_base (143)..(143): a, c, g, t, unknown, or other
  modified_base (675)..(675): a, c, g, t, unknown, or other
  modified_base (736)..(736): a, c, g, t, unknown, or other
  modified_base (748)..(748): a, c, g, t, unknown, or other
  modified_base (750)..(751): a, c, g, t, unknown, or other
  modified_base (754)..(755): a, c, g, t, unknown, or other
  modified_base (771)..(773): a, c, g, t, unknown, or other
  modified_base (775)..(778): a, c, g, t, unknown, or other
  modified_base (780)..(781): a, c, g, t, unknown, or other
  modified_base (784)..(784): a, c, g, t, unknown, or other
  modified_base (786)..(791): a, c, g, t, unknown, or other
  modified_base (794)..(794): a, c, g, t, unknown, or other
  modified_base (796)..(798): a, c, g, t, unknown, or other
  modified_base (1060)..(1060): a, c, g, t, unknown, or other
  modified_base (1167)..(1167): a, c, g, t, unknown, or other
  modified_base (1177)..(1177): a, c, g, t, unknown, or other
  modified_base (1197)..(1197): a, c, g, t, unknown, or other
  modified_base (1248)..(1248): a, c, g, t, unknown, or other
  modified_base (1252)..(1252): a, c, g, t, unknown, or other
  modified_base (1291)..(1291): a, c, g, t, unknown, or other
  modified_base (1702)..(1702): a, c, g, t, unknown, or other
  modified_base (1707)..(1707): a, c, g, t, unknown, or other
  modified_base (1721)..(1721): a, c, g, t, unknown, or other
tttttttttttctttttttttttttttttttttttttttttttttttttagttatcatacatttatttttaacatagcaccccagtttcacatcatgtatattttccaaagttggagatctttaactatgttcttcacagacntttcaacaagtgtgaaaaagaggcagtaaggttagcttgagtctacaagtcacaatccaaatataggacacctatgtttaaggtcaatatacataatgttcccaatgcttagcaaatgaatgagactctggctgagtaaaatattaacacaacttgttagcacattatcatgaaaagacagaaggcatcaaatatatactttgctgttacactttttactgttcaatgtacttgtagtgaaaaaatatacatttttactttcaaggttaaaatagaccatcagctcattatctctcttagccaatagctatgaagactaaaatggctcttcttgcttctggctcacttgaacatcttatttgtgctgaagacaaaaaggatagcagtgctaaagaaaagggtatacccggttcccaagataggtgcggttgaggttctcgcacaaggtgacttaaaacaaaaataacacaactcagttgatccaatctccacacaatggggttgcataatcaactgttccagccccagagangagctccctgaaagagctttaggatctggccctgttgttcaacagagggcttcaggatggnactggtatctgnannttnntttactgtagtttccnnntnnnnanntangnnnnnntanannntggtgtctgctggtcttcagagtcataaacccacttctctaatatcccacagccatgacattagcttacagcaagaccagagtattcacaaaacatgaaaaaatgagcatttcccaattgttgacagcagagcaaggcttctgtaactagaacatgtcctgtgtattgaaaccctgcaatgcctcctagaaaaggttcctttatcatcatgtgtgttggcatgtgtagaaaataactatacaagcctaaaagcaactgtgtncttcagatgtcttgctcatactaacagactgactgctttagggcatgcatgtaacacagcctccaaaagccttttttagaagagggcaacagctcttcgaatctgcnttgcgttgcnttttaaagtctggccctccnatgtctgctgctctcgggaaattcacataaccagatgcatttctccttacnaacnagcgaagcagggtggctcacagagtaatacccacattcnaattgccatcaatgactgacctatcagtgttggtaggatctcccctagcttgtgctgaaggaggaacaagacatgtgagctgaggactccaaaaacacaaatccccacttcttactaggaaattgaaccatactgagtcatgatacaaaaaaaaaaaaagtaacaaaacacccataactaaagtataaattcaactgatcctttgaaatcagagttttaaaagaatacccttgaaacagtaaagcagttagaaagaaaaaccagaattactagtgttctctttaaacacagtgggaaaacacctcttaactactatttcattttgttcacattcagaatgttcaaaccagaacctaatgatccctacttgtcaataatatgggaagctctggttgccatgatacgttatantgttntctttttatttttnaaaccacattcccttggtgatatctagtgagaaggtgtgattctagtttgtgttgaacaaatgtttttagctctaaggtgttacactgtaattgagatgtttccaactactgcttaaaagaagacattggcaaatgcctgccttaattgcaaaaaacacatgaattccaatattaccttattgatcttctgagtacacatctattattaccatggctgtgagatcatttaagaaacagacaaatgtcatttagaaacagactatagaatcaaatcacaactaaagagaatgctttatgatagctcagacag

SEQ ID NO: 494 - DNA, 1936 bp, Homo sapiens; identical to SEQ ID NO: 255
  modified_base (27)..(27): a, c, g, t, unknown, or other
  modified_base (220)..(220): a, c, g, t, unknown, or other
  modified_base (237)..(237): a, c, g, t, unknown, or other
  modified_base (253)..(253): a, c, g, t, unknown, or other
  modified_base (292)..(292): a, c, g, t, unknown, or other
  modified_base (300)..(300): a, c, g, t, unknown, or other
  modified_base (312)..(312): a, c, g, t, unknown, or other
  modified_base (329)..(329): a, c, g, t, unknown, or other
  modified_base (340)..(340): a, c, g, t, unknown, or other
  modified_base (342)..(342): a, c, g, t, unknown, or other
  modified_base (367)..(367): a, c, g, t, unknown, or other
  modified_base (740)..(740): a, c, g, t, unknown, or other
  modified_base (1223)..(1223): a, c, g, t, unknown, or other
  modified_base (1230)..(1230): a, c, g, t, unknown, or other
  modified_base (1234)..(1234): a, c, g, t, unknown, or other
  modified_base (1239)..(1240): a, c, g, t, unknown, or other
  modified_base (1242)..(1257): a, c, g, t, unknown, or other
  modified_base (1259)..(1263): a, c, g, t, unknown, or other
  modified_base (1265)..(1267): a, c, g, t, unknown, or other
  modified_base (1269)..(1274): a, c, g, t, unknown, or other
  modified_base (1277)..(1278): a, c, g, t, unknown, or other
  modified_base (1280)..(1280): a, c, g, t, unknown, or other
  modified_base (1290)..(1290): a, c, g, t, unknown, or other
  modified_base (1301)..(1301): a, c, g, t, unknown, or other
  modified_base (1305)..(1305): a, c, g, t, unknown, or other
  modified_base (1309)..(1309): a, c, g, t, unknown, or other
  modified_base (1316)..(1316): a, c, g, t, unknown, or other
  modified_base (1319)..(1319): a, c, g, t, unknown, or other
  modified_base (1321)..(1321): a, c, g, t, unknown, or other
  modified_base (1343)..(1343): a, c, g, t, unknown, or other
  modified_base (1348)..(1348): a, c, g, t, unknown, or other
  modified_base (1350)..(1350): a, c, g, t, unknown, or other
  modified_base (1359)..(1359): a, c, g, t, unknown, or other
  modified_base (1364)..(1364): a, c, g, t, unknown, or other
  modified_base (1370)..(1371): a, c, g, t, unknown, or other
  modified_base (1376)..(1376): a, c, g, t, unknown, or other
  modified_base (1883)..(1883): a, c, g, t, unknown, or other

SEQ ID NO: 495 - DNA, 1005 bp, Homo sapiens
  modified_base (84)..(84): a, c, g, t, unknown, or other
  modified_base (86)..(86): a, c, g, t, unknown, or other
  modified_base (88)..(93): a, c, g, t, unknown, or other
  modified_base (96)..(96): a, c, g, t, unknown, or other
  modified_base (109)..(109): a, c, g, t, unknown, or other
  modified_base (113)..(113): a, c, g, t, unknown, or other
  modified_base (952)..(952): a, c, g, t, unknown, or other
  modified_base (955)..(955): a, c, g, t, unknown, or other
  modified_base (958)..(958): a, c, g, t, unknown, or other
  modified_base (960)..(961): a, c, g, t, unknown, or other
  modified_base (963)..(965): a, c, g, t, unknown, or other
  modified_base (967)..(971): a, c, g, t, unknown, or other
  modified_base (990)..(991): a, c, g, t, unknown, or other
  modified_base (993)..(997): a, c, g, t, unknown, or other
  modified_base (1005)..(1005): a, c, g, t, unknown, or other
ctgctgcgacagccacgatagtcacttgctcatctgaaaatgccttgcactttcgttttcactagcttcgtgtatgacgcaaancngnnnnnnttnttttttttttttntaanagtaagaaaaatatacaactatatttaaaatacttaaattaacaagatagtacttttccattctaacaaaatatcatacattcagtttaaacaagagttaatatccagacacacgttttcaaaatacctgatgctagttgaaaattagtgaccatgaggctttccaagatatttctaattagcaaactgtgtacaattttgaagaagtgtacacaccgtgctggaagacagacactgaacaggtcaaaatgcaaactcatgtatctttcatcaacctaaatcttgttgcttcacttttctaaatgatactttggctgtcagcgaatcttatagcttcttttcccttaaagacaataatatataacaacaccaccccacacaaataaccataaacttctttgtgtgaaataagccctatcaaaatgtgttcatgtatttctgtaccaactgatctatactgagactgtcatgaaaaaggtatcaaacaagtgtaacaggcctacacttaaacctctgcctcaaaggagaaatcagatacttgccacgttattgcaaagtcaaagctgctacacttaaaatatggtagatagtttagaaaaatcaaatcaaaaatgttttctcactggctttttcagataaagaagttggaccacaaaccaacacatctgtgtgaaaacagccaccaatttgagtccccccagcccctcaaaaaggaacaatgccaccagtccctcacaatgaccataacgtctctggccaggactgcgatttctagcgcgtgtcttcacattctatctctggggaagcaagacaaacaggctctacccatttccctcctnttntcncnncnnncnnnnncctaagatcctctgaattnncnnnnngccgaaan

SEQ ID NO: 496 - DNA, 1784 bp, Homo sapiens
  modified_base (6)..(11): a, c, g, t, unknown, or other
  modified_base (295)..(296): a, c, g, t, unknown, or other
  modified_base (605)..(605): a, c, g, t, unknown, or other
  modified_base (656)..(656): a, c, g, t, unknown, or other
  modified_base (849)..(849): a, c, g, t, unknown, or other
  modified_base (930)..(930): a, c, g, t, unknown, or other
  modified_base (1007)..(1007): a, c, g, t, unknown, or other
  modified_base (1058)..(1058): a, c, g, t, unknown, or other
  modified_base (1185)..(1185): a, c, g, t, unknown, or other
  modified_base (1267)..(1267): a, c, g, t, unknown, or other
  modified_base (1317)..(1317): a, c, g, t, unknown, or other
  modified_base (1413)..(1414): a, c, g, t, unknown, or other
  modified_base (1595)..(1596): a, c, g, t, unknown, or other
  modified_base (1599)..(1599): a, c, g, t, unknown, or other
  modified_base (1601)..(1601): a, c, g, t, unknown, or other
  modified_base (1603)..(1603): a, c, g, t, unknown, or other
  modified_base (1607)..(1607): a, c, g, t, unknown, or other
agcggnnnnnnttttttttttttttttttttttgttaaaatatcttttaattttaccggcaaaatacatcaatgactaatatattcccgtatggaatatattcttattggaatatattcttatatagaatatatagactatgtatatatacatatgtgtatatacctatatacatatatatatcttggagatataaaactaattgggaataatgtcatatatatagatagtaagcaaacattttttaaaacattttaaagactccaaactattcatttctatccacctataaaannctagcaattaaacctgtcaaatcacagccatcttgctttacgcagattcagaaacatgagatccttttacctttgaaactctagtttcaaagctgttctaaagtgacttggttttaatttatatacttgcagggataagaagtagctgtagggccataaaaatgtaaagaatacagtatcgtgcccatacacaactgcaaacacttatttttaagtgttcgtaaaagatagtggtcttcagaaacaccccttttcagattggcaaactttcagagttcaaaagtgcatgtattacacttttatccccancaagctagtagctaccctctaaagcagaggttaacattttctttttccaanccacagaatggattatgatcccatgtgcatactcccatggttcccttccccaagttgtatgaaaaaataaagcaaataattctgaggttttaggggtagtggtatagggatagtattcacacacaaaaaaactgaagtacaaggatatgagacttttgttaaaatatcttttaaagtaattttactggcaaantacataaatgattaaccagttttaaaatagtaaacttatttatttatttatttttgagacggggtttcactctctcaccanggctggagtgcagtggcatgatcttggctcactgcaacctccgcctcctgggttcaagcgattctcctgcctcagcntcccgagtagctgggactacaggcgcacaccaccacacccagctaattttngtatttttagtacagacagggtttcaccatgttggccaggatggtcttgatctcttaattttgtgatctgccagcctcggcctcccaaagtgctgggattacaggtgtgagccaccatgccctgtcnaaaatattaaacttactaatacattgtaatttttagtacttctataattactgcttcataaaaaagtggatttttccagctntccagttcagatgctattaacaggtaatcagatagcactgactaagtagnaatagattaagagtaatacctaaatttaatgtattttagcatattgaaatgagtatcatcagtgtatatttcatttatcactttgtctacactttnntaggtggccttaatgcttgtcattgacaaatgttaactttcctcacaaaacctacactattcacttttttccagtatttttaccttccttattaaaaatgtttctaccatcaagaatttaaaatagaatcatgacattgcaatccaaacactaccttggcttgccagattagtctacgtgnnacncntnggtntaaagctataattccaacttccagcaaagaagtatctctgaatttgacatttctatgggaataaatgtgaactgtctcacatttaaccattaagaatttactcatacgtcatcatgataacctaatgttagactgagaatcactgctctagtgtggctccagaagctgtcagtcagg

SEQ ID NO: 497 - DNA, 706 bp, Homo sapiens
  modified_base (123)..(126): a, c, g, t, unknown, or other
  modified_base (213)..(213): a, c, g, t, unknown, or other
  modified_base (307)..(307): a, c, g, t, unknown, or other
  modified_base (518)..(518): a, c, g, t, unknown, or other
  modified_base (564)..(564): a, c, g, t, unknown, or other
  modified_base (568)..(568): a, c, g, t, unknown, or other
  modified_base (684)..(684): a, c, g, t, unknown, or other
  modified_base (696)..(696): a, c, g, t, unknown, or other
  modified_base (700)..(700): a, c, g, t, unknown, or other
ttttttttttttttttttttttaatttttaataacaatttatttccctttaaaaagatcaaatgtttttctcataatatattattttacaacaacaaagaaaaagaaagagagaaggaaagannnncctgaagagaaagaaataaccagattttagctcaaagagtatagcctgggattaattttttaagatttgtttgtcaatttcaaaaantcagcagtggaataaagagcttaatacaggtatgcaaaaaggaagccctcgagatgttttcaccaggatgaaatgggattagctttgtagttcntataatcttcttcacagaagaatgcaatttcagtttcactggcgattccagctgctttcagagtgctgtcttctttcagcaggagtctttcgtcatcttccaaactcaacacaagttcatttgtctttgatttatgtgcttgatgaataatctttagtgcatcatatttataatttctgaatggtggtggcaggttggtccttaaaggganatcttgctttagaaatacgataaattcctttacagtttggtccaanattnactccgtgatacactacaggtttgaaattgcgatgttcaaaggaacggatgaggcgaactgtgatggtcacttctccaggagccatgtgaagaaattcctgttcccggcgtccccntcggctactccnggcntttgcc

SEQ ID NO: 498 - DNA, 7659 bp, Homo sapiens
  modified_base (518)..(518): a, c, g, t, unknown, or other
  modified_base (656)..(661): a, c, g, t, unknown, or other
  modified_base (1026)..(1026): a, c, g, t, unknown, or other
  modified_base (1102)..(1102): a, c, g, t, unknown, or other
  modified_base (1179)..(1179): a, c, g, t, unknown, or other
  modified_base (1282)..(1282): a, c, g, t, unknown, or other
  modified_base (1342)..(1343): a, c, g, t, unknown, or other
gtatttgttgtgaaatttgtaagcgaataccattttcccacaggaaccagttatgacatgattccgaatttaatacgactcattatagggattttggccctggagcccaagaattcggcacgagggtgggtgtcactacagacatgttctggcgtgttctccgagggatggagcatcctgttatatatttgacttcaaattgagatgttggcttcattttttttttttacccaattaatctcccaatccctagcaactgtgactctgtatttagcacaagagaaagctgagaatgtgggtcttgcctccttccagaaatatgtctggctcatcaggacatttttttaaaacttcaaaatatttttaagatattttaaacttttataaaaaaaaaatcaaccaacaagagacttttctgaggaggaacatttgtatttgaacaagatccttggtgtgtagttcagtcttgcagtatacaagcttttgtgtataaatgttttatgatatgattccctgtnttttgcaggggtttttttctcttttgctttttagataaatatgtatatcaatattttaaattcatctttgctttttttagaggagtttgtaatcaccttataacatgaaaataaacatttcctttttaacatccaaannnnnngggttgtgttctggtgaggtatttccccctcaacgtttgccaaacgctttacattttataaagggcttcccgtccaatcccaggacgctcctcaaaggtaggtattttcccaggttagaggttcccacatggaggctcacagaggaagcagcttgctcactcaggggtacacagcaagtccatgaaagaacctggattcgcacccgggcccatgagctcttggctctactggctctactgattctacctgctacatgcccagccctgtacagctgggagatctggcagcagtcacctgagcctcagtttccccatctggaataaaccattgtccccatcaaggccaccaggatgattggaggtgntgctcttggccttaggtgctcacctgctgcggctttcagtccctcctctttagccttgggctgacctgccagaagngcagaaagcgggtggcggagtgggggaaagggtagagggggagcaaacctgattgcccttctcccactcccccaccntcaggtgcaggcgctcattaatacccagttaggggctctctggggtcacaacaggtccatgtttggggcagccttcctgccaacagcgccccccaccctttgngatggacaaactcgggagtcagttgagccctttgcccaactaaccagacaaaattctcannaactcatttatagacaatgttagaatagaagaccaccctacccccattttctggctctttctgacagcctctgcctacctccctccctctctctatgtgtactggccatgtggcttgtgttcaagccctggttccatcccttactacctgtgtggccttgggcaagttactcaacctctctgtgcctgtttcctcatctgtaatgatgggacaggaatagagcccacctccaaaggctcttgggaggatccagcaagctcttgcaaagcgcttagagcaaggcctgctgcctcccttggccttccccctgcctacaccactcccaagacagagtactcgcttcctggaaagaagctcttcctctgctcacagaactgtggcctccccagtggggcctggccctggcctctgggtcccagaccctgtagctcacctgccctagacactctctggacactccagggcagcagccagacccgaggctgccctcctgccactaccttcccaacctgggctaaagagactccatatgcaggcaccactgcctgcctctggctttctgctgcgcagagaatcaaatttgctccccctacccaagccttcacgactgattcctgctacctccaacctagtctccagccccattcccctcccaggccttctttctcttccttgagaccgtcaaactcgttcctatctcagggcctttgcactagctgtgcccgctgcctgagacactcttcctccaggtctccatggaggctggctcctgtcttcaggtctcattgcaaatgtcgcctcttgagagaaacccctcctaatattgtgagctaaagcccctcaccctggtccctctatcccgttactcccttgttttctttgttgcacttgatgccttttgaaataattatttatttgcttacttgttgattgtctgcctgccaccagaatgtgcagacatgacctaaatctgtctgattcatgttgcccaggggctggatgatggaagcaaatggcaaactttttgaattaatgaatcatcaaaagcaggtgagatgtcaccagacccatacagaagctgactcttgccaatccatgatttttttaaaaagcaaacttctactctaggtggatttaaataattttattttaaaaaatcatccccatggcacctacccccaagccactgcaacccctggtgggacaaagacttagacgagggccccaaacagaccataagcggcctttgcaatacagccccttgtgcttcccgagagccctaagaaaacccgatgtagaaaaatactttacaaggaatgtgttctaatctcagccagagaaaaatacagctttgggggagagggcaggtggaaggggacatgtcacaggggctgttcccaaaatgcataggcaggcagggcgctcactggggaaaggtgtcaggaaatttcaagtcggggatgaaccatccccatgagaagccagaagaaatattgcatatgaggaggccggcatggctgggaggcccaccgcgggcctgattgcatacttttgggagaatggcagaggcctcagcccgaggagggaggggggtattagttagagtcgggtgcatcttccctcgcctggagtcctggagtcaatgcagttttcccaagccgagaggccctgagagtgtgtcctgtccagccctgttgcttagcagaggtccagagaggctgagccacctgtccaaggtcacacagctatggctgcttgcatccagaagccacacctctgctgtgctgtccctcaccctcaaaagtgagggctcttggctttcacttggtgccctgtgacaggtagacagtgccctttcactctgggctgagtacacgggaatccaagatagcagaggcgctgagcaccccaggcacaagcatgcagggccctcagggagggcaccaaggggcagagcccagcgaagtggaggggaggggtaagggaggcaggcctccaggagacagcgtgggcaggtccccaagggggccttggtgggtcggcagagatggttccggccctgaccaggaggcctgtgtctgctcagactgtccacccgtgatcgtccagaggggctgggggtccaacccagacagggtcacacagcaaacaggtaacagacccagggtgaaaagaacagacctcttgactcctcatctgttccctcaaatggaagagcacttttctggcctccagggaccccaggttggagacagatggaggtgggagtgggtgccccgttttcctgagacccctgtgagaactgggccaggcaaagcacatccccagccctggctacacctgcccgcccactccatcccaggcaccactcactagaccaccaggggaggcccacacccttctcaaaatgaagagggtctctgatttgtggacactgaggacaatgattttaagggatgctggtgcttccagatttcaagtgggaatagacttctttgaataagcactttggacaccctccactgggcaagagtgtcccatctttttctctggcccatttctctcccatctccctccctctttctcctcttcctccactgatctggctgtaaagaggagcgctaccgcctcacaggtcctgcgtccatcgcttttcaattttcactggatggcaggtgaatggaagctccagggtcttttgccccaaaatgacccctcccacatggaggggcttgggctgagcggacgtgcagatgggtcagtggccacacggcctacagaagaagcaggagggctgagagcccaaggcccatagagcctgcccaatgggcccagaaccacagtctcaagtcccagaagcttcagactgagatgctgaaatcaaagaatcacccactttcagaatcaaagggccagcacttcctgggatcccagacgccccaacttaagagtctcataagtggggaccagattctgggaatctcagaatctcaggactagcaagccccaaacccctattctggagaagcgaaggagctgggctcccatccgaagcagcatccttcctggtggccgagtctctagatgaagtggctccccatcaggaagccaacccccaagcgcgtgtgcacgcatcatgggaatgcctcataccccaatgcatgactgcgctggggtatccagctcctgcctgctcacctcctgtgaccgagaactcactcctccttgcagctcattccagctccatggctttgctgggaggaagtgctccctacatcttcgacctctccaaggaggccccacagagacctgggacagcccccaggcctctctcctctcggctgagcagcctgtgccaacccttcttaagggaggctcctctgggcatcttggagacccaacttggcgagagaccccagctgtcactccaactagggcaggacctccctgcctggcaccccagtcaccacagacctggggaacagagaccaagcatcatcccaggctcagagtctgccagaccaacagatgaatgagtgggtggccgcttctccagcccagctacgtgtctgggagccaggatctgcctgggtggccccttaggagttcggcccacatgctgacttcagagcatccggggactgctggggcctggcgatcggggggcccggctgctgtgtgccgtgtgcggcttgcggctgatgatcagctccaagacatcacccgcctcggccaggagtggcaccgccaggcagcagtcgaagtcccgtgtacggacgtggttgacctgcaggaccctgtcgaagggctggaggcctccacggtgggctggcccatcagggcgcacagtgtggacatagacacctttttccaggaggccatctgagacgctgaaaccaaagtcatgccgcatggggtccttgtgcagggtcaccttgtgcatctccaagggtgtaggcagcaacagctcctccatttctgcaggagaggctcgtacctcccggcccctctgccaaggccggtggccaggcctgccctcgagggccaccctctgcacggtgcccgtcatgatggatgcctccagttccctcagcagctctgactgaccacatgactccaggtcttcgagagcttctccaaacatgcgccagaagccctcctctcgggcagggccaggggctgggctcgttggcggctcccaatcatccccctcctcctcctctggaaagctctcgtcagctggggttggggtatagctcgtcctccggggctcggtgggtggggggctgcccctcagccagccaggcctccgctcctggggggtcgtgccccgggctgctgcctgtggtgtataggaccctgggcccccaaagccaccctcggtggccgagctgtcccaagactccacagcactgtccacactgggcacagccggcgagaagcgggctgctggcaggcctcctttcagggcatctgctgggtcctcatcagcatcactggtctcactgaggctgcccgacttgcggggtaggaggggacggtctagttgcttcttgatcttcagtgtgacggtctctccagccacctgcaggaggtggatggcctcgctcagcggccggcccttgaggctaacgttgttgatggccagaatgcggtcccccacgtggatggcaccagtcctctcagccaggccacgcttggtgaggcctgagatgacaatggggtcaaaaggttcctccgtgcccgaaatggtgatgcccaggggacccccgtagcgcttcagctccactgtgtagctgacggcacctgtggtctccagctcatcagagttgtcctcgtccttccggatcttcagcttcaccaggtcctcgcactgccgcaggatttgcacggcgtcctccatggggcagttgtccaggcggatattgtcaatggccagtagcttgtcgcctggctccagggtgcccgtcctgtgtgccacgctgcctttcttgatgtcggagatgatcaagggctcccctcgtttcctgctggccgagctgatggtgatgcccagctccacgctgcgcttcttgggcagcttcacgtggaaggtgccactgcttgggatgacggactccgccacatcgaactccacctccagcacgaccttgtgggccagcgcggcgtcccgcaggagctggttggcttcctccatagtcccgtcctcggtggcaatgccattgatggacaggacacggtcccccacctgcagcagcccacacctctcagccgggctgtcaggctcgatgaagcacacgaggggtggggaggacagggtctcggtggcgaagatgccgccctggagctggaggccaaagccgctgagggggtctccacagagcacgacctccgtggtctccgtgtgcacaatctgcccgcccggccccaccgtgctggaggctagcgacaacgagctcttgtgttcccttcttcgctgcctcctccgccccattgtagttcgaggactcatgggctgggatccacggggaagggtgctggggttgttgcaggaaaaggcgtggttcaaggtcggcgaggaaaagggagttgaagacaaggatcggctttggtcctggccagcaggtgtggcccaggtgggcatcctgcagtggccgggccgggggctgtggcaggagggcacgcaggggtcccagcggtgcagctgctcactcctctgcactttcactgcctctgagggcctcagtggccgctgactctggggcacaggcaggatctccagccgcaccttctctgaaatgctggccaggagcttggtggcctcaagcagcgagcagtgttccatgctggtgccatcgatggacaggatgtggtctccagggtgcagggctccgctcctgtccaccacgctggctggcttgatgcggtcgatggtaatgactgacttgttccggagggaggtggtggtgagcgagatccccagggcagaccctggcgtcttgactatttccaccatcaagggtcccgaagcattagccaccgtgtcaggggtggccacatcatactccacctgaaagagtgcctcgtggctgcactgccgcagggtggccagggcggtggcatggctggccccgtgcagcgggattccatcgacgctgagcagcctgtcgcccaccttcagggagccctccctgtcggcagggccaccgggccgcacgtaggtcaggacaagcgggcgggacttgtgcccatcttcatgggcacctcctctaaggacaaagccaaagctattgccctccttgtagagggagacgtc

SEQ ID NO: 499 - DNA, 860 bp, Homo sapiens
  modified_base (799)..(803): a, c, g, t, unknown, or other
  modified_base (805)..(807): a, c, g, t, unknown, or other
  modified_base (809)..(810): a, c, g, t, unknown, or other
  modified_base (812)..(812): a, c, g, t, unknown, or other
  modified_base (851)..(852): a, c, g, t, unknown, or other
ttttgttcaaaaactttatttgccttctgctcattataattacatataatcttcaaggagtttaaatgacaaccaaatccaaggcctggcccccaagaacacagtgataggattcagcatttggtgtttctaattatacaatgactacatatatatcatagacttgctctcatccattctccaccataaagtttcaatttcctcttaaaatatggcagtcaagtttagtctcattcaaaatcttatctggtcctacagcatattacagacttagactcactcttctgttttaattgatgttactgtgtagccgaagattttaaaaaaagatttatagatatacacttgaaattctgcagtcttgaaatactacaataaatttttcttacttatgaaaagccaacaacaacaaaaaaggccaggccaggcataagacagaggggaagggaagatgaggagggaggtttgagagtcccatcattttgccttgctgaaactgggtttcagtagaaatatttggcaagaatagtgtggaaaaggaggatggagaaagaggttactctgattttatgtaataattcagtttcaaaacatactgatatcaacctccaaaaatagtagttcacatctgcaatacaaataggcacacacggtaaagatggttaaaaagtagaatttaaaaggctatttgtccatcttcaggacattttgcaggcggccccaccctccccacatgtcctgtatttacattttactcttcagaaaagccccttttaaaagaatgctatttcttcctccnnnnntnnngnntntttttgttttgtattgttttgttttgttttgtttttaannagcaatta

SEQ ID NO: 500 - DNA, 1195 bp, Homo sapiens
  modified_base (149)..(153): a, c, g, t, unknown, or other
  modified_base (228)..(228): a, c, g, t, unknown, or other
  modified_base (623)..(623): a, c, g, t, unknown, or other
  modified_base (983)..(983): a, c, g, t, unknown, or other
  modified_base (999)..(999): a, c, g, t, unknown, or other
  modified_base (1004)..(1004): a, c, g, t, unknown, or other
  modified_base (1034)..(1034): a, c, g, t, unknown, or other
gctttagactattttccttcagttctctgcagtcgcagtgaaatacttcaagcgcaatttttgctgaactcttcttttcagcagtggaaaagctgcggaaatggaaacttacccccaacatatttcaatttggaagttcaacttcaaannnnnttcataaaaatgtaagttttattgagtgcctatagtgtgcatgggcctttattagacacgccaaattcaggcacnacagacacaagatccctggcctcaggtaccttatgatctaattaatagatattagaaacagtagaaagacaagttacacgtcaatgcccaatgactagagtcaacattaaagagttgtaatttaagtaatccaaactgacatctaattccaaaatcatttataaaatgtatttggctttggaatccacaggacttcaaacaagcaaagtttcactgcagatagtcacaaagatgcagatacactgaaatacttaagagccttattaatgatttttgttattttggatcttctgtttttttcttattatggtccgaagcctccttaataccaatttatcagacagaagcatgtcatcttgttgttcaagataatccagtaaattttcagtccattncaagtgccgctttatggctaatatgcttctctggattcagttctgtttttctactcttactggaaggcttttgctcagcagccttggtctggtcctcagcactttcactgtcagtcagcacctgacagcttgagtcactgctccgagagtcgaaccactgatcaatattctcaatgtcaacatgttcacattcttctgtgttctgtaaaactgttgctaaattagctgctaaaatggctccttcatcaatgttcatacctgaattctcttcattgccagggaaaagttttttccatgctttggttatggtacttgattttaccatgttccaagctcttgacacttcataaattgcatccnaacactgtcaagttcnttccnaaaatatttttgggtcatttccttcatccnatgtatttctggagaagtcctgctcgatagtatctttttacagtggctagaactccctggctcattggttgaatcagacttgtgacatttggtggcaaatacttcacaattattctgccatcatctgaactcaacatttcttcatttggacgtgctggggg

SEQ ID NO: 501 - DNA, 2123 bp, Homo sapiens
  modified_base (1778)..(1780): a, c, g, t, unknown, or other
  modified_base (1784)..(1784): a, c, g, t, unknown, or other
  modified_base (1786)..(1789): a, c, g, t, unknown, or other
  modified_base (1791)..(1792): a, c, g, t, unknown, or other
  modified_base (1794)..(1795): a, c, g, t, unknown, or other
  modified_base (1797)..(1800): a, c, g, t, unknown, or other
  modified_base (1802)..(1809): a, c, g, t, unknown, or other
  modified_base (1811)..(1812): a, c, g, t, unknown, or other
  modified_base (1814)..(1814): a, c, g, t, unknown, or other
  modified_base (1816)..(1819): a, c, g, t, unknown, or other
  modified_base (1821)..(1821): a, c, g, t, unknown, or other
ttatagttattcttttccttatgaaaaacaaaaaggggactgggcgtggtggctaacacctgtaatcccagcacttggggaggctgaggcgggcagatcacaaggtcaggagttcgagaccagactggccaaaaggatgaaaccccatcactctactaaaaatacaaaaaattagccaggtgcggtggggcgcaccagtaatcccaactactagggaggctgaggtaggagaatagcttgaacccgggaggcggaggttgcagtgagccaagatcgagccacggcactctagcccaggtgacagtgtgagactctgtctcagaaaaaaaaaagaaaaacgggatcgagatggtttgcaggattagcaagtgatagagatatattgaagacatagaaagccagtgtggttgctcacacctataatcccagcactgtgggaggccaaggcaggaggatcacttgagtcaatgagttagagaccaacctgggcagcaaagtgagaccccatctctacaaaaaaattttttaaaaatcagccaggtacggtggtgcacacctgtaatcccagctactaaggaggctgaggtaggagaatctcttgaacccgggaggcagaggttgcagtgagccaagatcgagccacggcactctagcccaggtgacagtgtgagactccatctcagaacaaaaagaataacaggatagggatggtttgcaggattatcaagtgatacagatgtactgaagacacagaaagccagtgtggttgctcacatctataatcccaacactttgggaggccagggcaggaggatcacttgagttgacgagttagagaccaacctgggcaacaaagtgagacccccacctctacaaaacattaaaaaaaaatgagctgcacatgttggcacgcacttgtaatcccagctacttgggaggctgaggtgagaggatcacttgagcacaggaggttacagtgagctatgatcacgccactcgacaccagcctgaatgacagagcgagaccctgtctcaaaaaagtggggggaaataaaaggatatagtgcactggattgaaactttctcctgtcgttatcataagcagaagaattgaagtaactaaaaagagaatcatagtctcaatgtgtgcttgaatgttatttaacatcacgtctctgctacctcatcattaaccagctgtggtaatgattccacactttgaacccatcccacctgttgacagaagcgattgcaatgccagcatcactcagtgacggctcatcatgtagggcccagaatactgattttgtgacttctaagcttgtgctccattcccaacacaaagtcttctgaccagcctttgagtaccattattgtagaggaagctcatcttaggtaactattactagagcagaaatcacttaatataaaatatttcatgtatcaaatttaaaactcacttttgggttcattgatgtagtaactcaaccaggaaacttaaatggaattagtgttttcactgacaataatgatgctgctttttcattataggcccataagatggcctggcctttccttgaaccagtagaccctaatgatgcaccagattattatggtgttattaaggaacctatggaccttgccaccatggaagaaagagtacaaagacgatattatgaaaagctgacggaatttgtggcagatatgaccaaaatttttgataactgtcgttactacaatccaagcgactccccattttaccagtgtgcagaagttcnnnaatnannnntnntnnannnntnnnnnnnntnnanannnngnaggtctcataacaacaaactgcagtctacagcttcttaaagttcagcgtgttaacctaacataaaacacagcaagaatctggttgtctgaactattttaaattaaggagccagatgtttttagtcaggctatcctgacaagacttgacctaaacttcgtttttattggccataacagtccaattatattcttggccaattttgtccaacggacaagaaaaaagcaaagtcaacgacaccattatcttgtcaagatcagatggttttactattgtggcagaagcgagaaaactttgtttgttg

SEQ ID NO: 502 - DNA, 2111 bp, Homo sapiens
  modified_base (333)..(333): a, c, g, t, unknown, or other
  modified_base (905)..(905): a, c, g, t, unknown, or other
  modified_base (935)..(935): a, c, g, t, unknown, or other
  modified_base (955)..(955): a, c, g, t, unknown, or other
  modified_base (1509)..(1509): a, c, g, t, unknown, or other
  modified_base (1581)..(1581): a, c, g, t, unknown, or other
gagggctcgaggtgccacggcgtccaggagcgaggacagggccagctacaaaagaccccacagctgtagagagagcaaacttgttaaacatggctaaactgagtatcaaaggactcattgaatctgctctgagctttggccgcactttggattctgactatccccccttgcagcaattctttgttgttatggaacattgcctgaaacacggtcttaaagtaagaaaatcatttttgagttacaacaaaaccatctggggccctttggaactggtggagaagctgtaccccgaagcagaggaaataggagctagtgtccgggatctacctggtnctgaagacccctctgggtcgagcaagagcgtggcttcgattagccctcatgcaaaaaaaaatggccgattacttacgttgcttaattattcagagggatctcttgagtgagttttatgagtatcacgcactaatgatggaagaagaaggagcagtaattgttgggctgctggttggcctgaatgtgatcgatgctaatctgtgtgtgaagggagaggatttagactcacaagttggagtgattgatttttctatgtatttaaagaatgaagaagatattggaaataaagaaaggaatgttcaaattgctgccatattagaccaaaagaattatgttgaagaattaaatagacaactgaacagcacagtcagcagcctccattcaagagttgattcattagaaaagtcaaatactaagctgattgaagagttagcaatagcaaagaataacatcattaaactccaggaagaaaatcatcaattacgaagtgaaaataaattgattttaatgaaaacacagcagcacctagaggttaccaaagtagatgtggaaactgagcttcaaacatatangcattctcgtcaggggctagatgaaatgtncaatgaagccagaaggcagnttcgagatgaatctcagttacgacaggatgtagagaatgagctagcagtacaagttagtatgaagcatgagattgaacttgccatgaagttgctggagaaagatatccatgagaaacaagatactctgataggccttcgacaacaactagaggaagttaaagcaattaacatagagatgtatcaaaagttgcagggttctgaagatggcttgaaagaaaaaaatgaaataattgcccgactagaagaaaaaaccaataaaattactgcagccatgaggcagctggaacaaagattgcagcaagcagagaaggcgcaaatggaagctgaagatgaggatgagaaatatctacaagaatgtctcagtaaatctgatagtctgcagaaacaaatctcccaaaaggagaaacagctggtgcaactggaaactgacttgaagattgagaaggaatggaggcagactttgcaggaagatcttcaaaaggagaaagatgccttatctcatcttagaaatgagactcaacaaatcattagtcttaaaaaagagttccttaanctccaggatgaaaatcagcagttgaaaaaaatatatcatgaacaagagcaagctcttcaagaactcggcaanaagcttagcgaatcaaaacttaaaattgaagacataaaagaagccaacaaagcattgcagggactggtttggctgaaagacaaagaagcaacacattgtaaactttgtgaaaaggaattctcactctctaagagaaagcaccactgtagaaattgtggggaaattttctgtaatgcctgctctgacaacgaactacctttgccttcttcaccaaaaccagtacgggtttgtgattcctgtcatgcattgctcattcagagatgctcatctaacttgccctgagactccagaactaaatccttatgtatgaaattacctacaatgaatgttatgatgttgtatacaaagacatggcagctactgcatcttcatgtgtcacaaactctacatctgcttctcctgtggctctgccatcagctccaatatcaatatgaactcgtattggatttagtggtgagaagaactaaataaaaggaaacacttatttacttttctattgagaatattaaagtaaattaccacataccttg

SEQ ID NO: 503 - DNA, 1105 bp, Homo sapiens
  modified_base (8)..(10): a, c, g, t, unknown, or other
  modified_base (12)..(12): a, c, g, t, unknown, or other
  modified_base (36)..(36): a, c, g, t, unknown, or other
  modified_base (325)..(325): a, c, g, t, unknown, or other
  modified_base (811)..(815): a, c, g, t, unknown, or other
  modified_base (820)..(821): a, c, g, t, unknown, or other
  modified_base (823)..(823): a, c, g, t, unknown, or other
  modified_base (897)..(897): a, c, g, t, unknown, or other
  modified_base (958)..(958): a, c, g, t, unknown, or other
  modified_base (960)..(961): a, c, g, t, unknown, or other
tctctccnnntnacagtgaaacacttttatgaaggntgcctgagaggtaatctactgacttggagagtatgttcaagggatcatataggaaagtcatgggctcttccccacgcaaccatctccagagacctaaataaaaagcaaatttaatacgaataagtggacagatgagctgcccagtaggcaggcactgagagactgatcagtgggatactcaagcagagtgagacagagcggaaccttccaagtggtattagtgttgacctggattacatcccataatgagttctggatccagaattacctgagggaaggggtctgttancagtgccataaagggtcagtggctctgatctcccaggcgtcagggtcccttgcagagatgactgagaaccaagtgcacaaagcacagatgaagctgctacaggctggaaccccaggggccactggaatgtccatttcctgcagcctgcctatactgaggtttaatctagataacgtttgacaaaagggtcagggtaagattaggagatgataattaacctctaggagtctacctcattgtacagctgctcccccactgggtactcccattcttctaagaccaagggctgccagtgggacccacactgctctgcatcaagcttccagaccactgcccaccctcccttcctcaaaaggctctcacctgggagatgctatcctgtcatgcctgctttcccctctggcaggtgccactggccttgtggccactcctcttgttcaccaaggatgctgactcctaggtcacaccattctcctcaacatctgnnnnnttctnncntcagcacccatgtggaggctcaccctgccctccagcctcgccaaccctagatttcacttcttaaggctcctccntggctctggccagcaaccccaggtcataccctctattttgcctttacctgagattgctccncnnctcaatttccaaagcactcctgtctggctcaaatatacctccctgcccaacccctcaccatgctggagtttctatcttgtcaagacctctaatttcctaatccctccctagtcacctcctgttttcaattccaatttcttggtc

SEQ ID NO: 504 - DNA, 665 bp, Homo sapiens
  modified_base (470)..(470): a, c, g, t, unknown, or other
  modified_base (536)..(538): a, c, g, t, unknown, or other
  modified_base (540)..(545): a, c, g, t, unknown, or other
  modified_base (547)..(553): a, c, g, t, unknown, or other
  modified_base (558)..(560): a, c, g, t, unknown, or other
  modified_base (562)..(564): a, c, g, t, unknown, or other
  modified_base (566)..(572): a, c, g, t, unknown, or other
tgaattattggcaaatatataacatattttgtttctccagtcttcatttctcctttttttctgctgtacatctcccaaaggtcataaatcatacaccaacaaacaaaaagtttcttacatatatacacctgtcaccacagttcagctttccattcctattcctgatctatattcttctcctatgtttcagataactgactccacacaacaaattatgtgtccattgttttcttgatttctttttaacaaatgctaaactataaagtcatctgcacttttgtaagtattttaacaaggccaatacattccaggtatttaagaagccacaggagaaatctagggtcctttggcttgttgctttacattgaatttacctacatgtggaaaaccactaatctggatccctacttcaaactaatttttgcctcctagaaaggcagtacgtaattcttaaaatataaagatcaaanttaaatcaaatcatacttgacttgcattccagctgtgctctttgacttgtcaaagtctcaatttcnnnannnnnnannnnnnnatggnnnannntnnnnnnnatgcctggaaatggatgcgagaaagactgagtccccatggatggctcatgccaaatcaaacagtactaaaaacctcagacacctgatgtggcc

SEQ ID NO: 505 - DNA, 682 bp, Homo sapiens
  modified_base (37)..(38): a, c, g, t, unknown, or other
  modified_base (40)..(40): a, c, g, t, unknown, or other
  modified_base (477)..(477): a, c, g, t, unknown, or other
tttttttttttttttgagatggagtctcgctctgtcnncnaggctggagtgcagtgatgtgatctcggctcactgtaacctccgcctcccgggttcaagcgattctcctgcctcagcctcccaagtagctgagattacaggcgagtgccaccacgcccagccaatttttgtattttagtagagatggggttttaccatgttggtcaggctggtctcaaactcctgacctcgtgatctgcccacctcggcctcccaaagtgctgggattacaggtgtgagccactgcgcccggatgaaatacaagagatttttaaagaagttttcaaactattcaggttacagacacaaatttatagaattaaggagatttatagtgtacatcaaagttcatagcttatttatttgcaattttgtggttcgtaaactaatgaagaattatactaaatgacctatatagtctcttttagctataaactntcaattatattattctgctttaaaataattaagaccatatctcaaagttgtttaagtagataatgtcggccctgaattaaggatttttttttcatcccctttctggcttttagtccttcctagtcagttattaatggggaataaatattacacattttactcaactgattcttaattcctagctctattgccccctcctctcctc

SEQ ID NO: 506 - DNA, 714 bp, Homo sapiens
  modified_base (533)..(537): a, c, g, t, unknown, or other
  modified_base (541)..(549): a, c, g, t, unknown, or other
  modified_base (551)..(554): a, c, g, t, unknown, or other
  modified_base (652)..(653): a, c, g, t, unknown, or other
  modified_base (655)..(656): a, c, g, t, unknown, or other
  modified_base (658)..(660): a, c, g, t, unknown, or other
  modified_base (662)..(667): a, c, g, t, unknown, or other
  modified_base (669)..(677): a, c, g, t, unknown, or other
  modified_base (679)..(681): a, c, g, t, unknown, or other
acttcccaaaaccccaccttctttttttttgggcaggttttggggtggcctcccactttggcgtcctaacagacctgccgtgtgttggggtggccaagaaacttctgcaggtggatgggctggagaacaacgccctgcacaaggagaagatccgactcctgcagactcgaggagactcattccctctgctgggagactctgggactgtcctgggaatggctgacatctgctcccgagagcacatccgcaagtcgctgggactccccgggccacccacaccgaggagcccgaaggcgcagaggccagtggcatgccccaaaggagactccggagagtcctcaggtggagcacccagtccccaaagacaggctgaccgcaccaccccagggggacgccgcagcacagcccagcaccaggtggggcagaggtgaccacggcccctctttgctccgtcatcggctggtcagctgtggtcacggtgcctcagaggacagatctctatgggggcaagtgccagatcctgagagcgcatnnnnngctnnnnnnnnncnnnngaaggggactcggagctgcagcctgcacgacccctgcagcctgtgctttgcccacccctttcaatagatggaacttgcttgctcttttttaaaaaaannannannnannnnnnannnnnnnnnannnaaaaaaaaaaaaaaaaaaaaaagtcgtatcgat

SEQ ID NO: 507 - DNA, 462 bp, Homo sapiens
ttttttaaaaagatgtataagactgtacagaaaacattgtaaaatttagagaagctaaagaagtgcagtcctatgctacacagatggaagggaagaatatcctacacaggtaattgggtatggcaagcaaggctagaactgaggaaaaacagaatcaggcccagcctaaaagcagcacactactgacatatggaaatgtagatttccattccacaaatcttactatgtttctaagagaaactagaagtccagatttctatggaaattcttttttcttttttatgtactggcagaaacaattttaaataccacacaggacaaaaaagaacacatctgtggaagaatttggccccgagccaccagttttctactcctgcaatctacctacttatctttagataattcattaatatttctgggttgtgcttaacctacacacgcaaaaggttacacacactacag

SEQ ID NO: 508 - DNA, 789 bp, Homo sapiens
  modified_base (53)..(53): a, c, g, t, unknown, or other
  modified_base (533)..(533): a, c, g, t, unknown, or other
  modified_base (627)..(627): a, c, g, t, unknown, or other
  modified_base (629)..(631): a, c, g, t, unknown, or other
  modified_base (669)..(669): a, c, g, t, unknown, or other
  modified_base (672)..(672): a, c, g, t, unknown, or other
ctttttttgttacaaaataaaacaaaagcatttatgtaattcagaaaaaaaancatgaattttcactccaaagacatagcacagaaaagcttacttacaattaccaacaccacactattgtacctttaaatatgcaaaggtaaagagactcaaagttgcattttaccatttttaatctctccaaattagacaagcaatctaaaagaagatgtcacacattcctgtttaatgcatttgctgaaatctttcagactttaaaaactttaggtaaaagcaatggcaacttgaagtttcttttccaatcatatttaagttagccattaaatgctgaattaacaattaatccatacaataatataaaaatacacatattaaatcacattgtttttcattattgaagcttaataaaaatatcattttaatataaccattttgaagaactcaaatggctgaacttattatagtgtctaaattataccatcaatagaaacattacattttccccccagttggtgaaaatgagctcatgcaangtatttctgacactcacagtgacacatatggtctgccattctaaagatgtacaagcagctctcacttttaaacatgacaatatgattcagaatnannnagcatttgttaaaaataccagctttcacatgtttcatnaanctctaaaccaaaataataattttgatgtgtttcaggtatcagacaaagcagataatttaaaaggtaaatgattctactagtgcagactagttatcactgtggctaattttaaaacga

SEQ ID NO: 509 - DNA, 451 bp, Homo sapiens
  modified_base (4)..(6): a, c, g, t, unknown, or other
  modified_base (9)..(9): a, c, g, t, unknown, or other
  modified_base (54)..(54): a, c, g, t, unknown, or other
  modified_base (255)..(255): a, c, g, t, unknown, or other
  modified_base (261)..(261): a, c, g, t, unknown, or other
  modified_base (280)..(280): a, c, g, t, unknown, or other
  modified_base (284)..(284): a, c, g, t, unknown, or other
  modified_base (296)..(296): a, c, g, t, unknown, or other
  modified_base (316)..(316): a, c, g, t, unknown, or other
  modified_base (329)..(331): a, c, g, t, unknown, or other
cttnnntanatgcacagtgcaggcagaaagtagaatgcatcttcaattgtcctntaggctgcctgtaaccttttcatgggcaacttgttctaatgccaccagccaacccatgttttagtttgctggggctacattacaaagtaccacagactggagggcttaaacaacataaacttattgtctcacagatctggaggctaaaagtgtgagattgagaggctggctggcttggttccttctgagggctgtgagggnaggatncattccagacttctctccntggnttgctgatggcntgtcttctctctctgtcttnacatcatcttccnnntgggtgtcactgtgttcaaatttcccttttatagggacaggttagtaagattagggcccacccttatgacctcgttttaacttctataatgatctagtttccaaataagttacaccctga

SEQ ID NO: 510 - DNA, 422 bp, Homo sapiens
  modified_base (13)..(14): a, c, g, t, unknown, or other
  modified_base (25)..(25): a, c, g, t, unknown, or other
  modified_base (88)..(88): a, c, g, t, unknown, or other
  modified_base (110)..(110): a, c, g, t, unknown, or other
ttttttttttttnnttctggcatangtaggggcagtatatggggttctaacctctattttattttattttatcttatattatcttatnttatttttttaccacttcccanatacccacttctttaaatgactttagttggtgctcttcttttcagtctcaccttatctctctctctctctctcctctttcttttttttttttttttcggagttttgctcttgttgcccaggctgctggagtgcaatggcacgatctcagctcaccgcagcctctgcctcctggctcaagcgattctcctgcctcagcctcccaagtagctgggcgttacaggtgtgcgccaccatgcccagctaattttgtatttttagtatagacggggtttctccatgttggacaggctggacttgaactcttggcctcc

SEQ ID NO: 511 - DNA, 501 bp, Homo sapiens
  modified_base (234)..(235): a, c, g, t, unknown, or other
  modified_base (237)..(238): a, c, g, t, unknown, or other
  modified_base (240)..(248): a, c, g, t, unknown, or other
  modified_base (250)..(253): a, c, g, t, unknown, or other
  modified_base (256)..(261): a, c, g, t, unknown, or other
  modified_base (264)..(265): a, c, g, t, unknown, or other
  modified_base (271)..(272): a, c, g, t, unknown, or other
  modified_base (274)..(275): a, c, g, t, unknown, or other
  modified_base (278)..(278): a, c, g, t, unknown, or other
  modified_base (282)..(282): a, c, g, t, unknown, or other
  modified_base (290)..(290): a, c, g, t, unknown, or other
  modified_base (340)..(340): a, c, g, t, unknown, or other
  modified_base (372)..(372): a, c, g, t, unknown, or other
  modified_base (387)..(387): a, c, g, t, unknown, or other
ttttttttttttttttttttttgactcaaaagcttgctttatttgaggacaatttcatcctgaaaaccaggagcggggtgttgcggggtgggagggcggccaagacgtctgagcagtatcccaggcaccccttccagcccagggtgacctcgaaagcagcagagagaacggggactggaggcgggtgggccctggaaatcctctcatggtgcgggtggggggggtatggggggnngnncnnnnnnnnntnnnngcnnnnnngcnnctcctnncnncangaanaggcccangtgcagcaggaaaccccgtccctggtgctcactggtgaccgtgggcagangagaggacaagtctctccacacagcagcctgnggccatggggtacantccatcttttgccaattgtcttcttttatttattctggcaaaatgcccattcccaaaggcttctgcatcctgtccatcagacaggacagtcgtgccttttcaaagtccaaggct

SEQ ID NO: 512 - DNA, 2617 bp, Homo sapiens
  modified_base (208)..(244): a, c, g, t, unknown, or other
  modified_base (526)..(678): a, c, g, t, unknown, or other
  modified_base (704)..(704): a, c, g, t, unknown, or other
  modified_base (741)..(741): a, c, g, t, unknown, or other
  modified_base (775)..(775): a, c, g, t, unknown, or other
  modified_base (791)..(791): a, c, g, t, unknown, or other
  modified_base (858)..(858): a, c, g, t, unknown, or other
  modified_base (864)..(864): a, c, g, t, unknown, or other
  modified_base (888)..(888): a, c, g, t, unknown, or other
  modified_base (895)..(895): a, c, g, t, unknown, or other
  modified_base (1087)..(1087): a, c, g, t, unknown, or other
  modified_base (1098)..(1125): a, c, g, t, unknown, or other
  modified_base (1227)..(1227): a, c, g, t, unknown, or other
  modified_base (1341)..(1341): a, c, g, t, unknown, or other
  modified_base (1382)..(1419): a, c, g, t, unknown, or other
  modified_base (1637)..(1637): a, c, g, t, unknown, or other
  modified_base (1680)..(1680): a, c, g, t, unknown, or other
  modified_base (1729)..(1754): a, c, g, t, unknown, or other
  modified_base (1837)..(1857): a, c, g, t, unknown, or other
  modified_base (1958)..(1959): a, c, g, t, unknown, or other
  modified_base (1963)..(1963): a, c, g, t, unknown, or other
  modified_base (1998)..(1998): a, c, g, t, unknown, or other
  modified_base (2031)..(2031): a, c, g, t, unknown, or other
  modified_base (2041)..(2041): a, c, g, t, unknown, or other
  modified_base (2069)..(2069): a, c, g, t, unknown, or other
  modified_base (2089)..(2089): a, c, g, t, unknown, or other
  modified_base (2095)..(2095): a, c, g, t, unknown, or other
  modified_base (2543)..(2543): a, c, g, t, unknown, or other
  modified_base (2570)..(2570): a, c, g, t, unknown, or other
  modified_base (2596)..(2601): a, c, g, t, unknown, or other
gcgggccgaggagccgggcgcaatggagcggaagaggtgggagtgcccggcgctcccgcagggctgggagagggaagaagtgcccagaaggtcggggctgtcggccggccacagggatgtcttttactatagcccgagcgggaagaagttccgcagcaagccgcagctggcgcgctacctgggcggctccatggacctgagcaccttnnnnnnnnnnnnnnnnnnnnnnnnnnnnnnnnnnnnnaacaagagccgccagcgcgtgcgctacgactcctccaaccaggtcaagggcaagcccgacctgaacacggcgctgcccgtgcgccagacggcgtccatcttcaagcagccggtgaccaagattaccaaccaccccagcaacaaggtcaagagcgacccgcagaaggcggtggaccagccgcgccagctcttctgggagaagaagctgagcggcctgaacgccttcgacattgctgaggagctggtcaagaccatggacctccccaagggcctgcagggggtnnnnnnnnnnnnnnnnnnnnnnnnnnnnnnnnnnnnnnnnnnnnnnnnnnnnnnnnnnnnnnnnnnnnnnnnnnnnnnnnnnnnnnnnnnnnnnnnnnnnnnnnnnnnnnnnnnnnnnnnnnnnnnnnnnnnnnnnnnnnnnnnnnnnnnnnnggtgaccgacgaggacatcaggaagnaggaagagctggtgcagcaggtgcggaagcggctggnggaggcgctgatggccgacatgctggcgcacgtngaggagctggcccgtnacggggaggcgccgctggacaaggcctgcgctgaggacgacgacgaggaagacgaggaggaggaggnggaggngcccgacccggacccggagatggngcacgtntagggcaggtgctgcggggccacgggggctccctggagtcgggtcctggcagtggggactgcctggtgaacacagatgtgcttgggatgacgggtgcctcccaagagcttcccatctccctagaagagcccaagcgtccccgtcccgtggagtcgctaaagccagccctccctgtcctttccagaggccctnccgagagcccnnnnnnnnnnnnnnnnnnnnnnnnnnnngcggtcctcggccccacgtgaaccaggctcggcggcgaagcccagccttggagacacccaggaggaaggccgtgctcctggctccctcctcggcccgtcccnacttcccggggcctcggggcacacagctggggctgcccccacccgaaagaccctccacgctcgtcctctacagagtccggcttcgggaagtgccgggtgctcctgggccctgcntggctccctacgacctttgggctcgaggccagctcctcccnnnnnnnnnnnnnnnnnnnnnnnnnnnnnnnnnnnnnnccagcaggtgcccggcagctcggcgccacggcttgctgacagctgggagggtttctcggtctggaggcgtagttttgaaactcacatcacccactgtgcagcgtgaggacgggactctggtctgctgtggggggcatgcaggacggcgccactctctgccctgccatgcggctggtggtgccacagagcctcaccgtgcctgagtggcgtgcccaggnaggccgctctccttcagtaaatgtaacacagtcgaggcacgtnatcgggcagccttccctgtgtgccaacgccagccttcgcttctgaaaannnnnnnnnnnnnnnnnnnnnnnnnnacttggtcgcccggcgctgccagaatgctccactgccagccggcccccctgcctcggtttcccttctgtttagtggcgacacnnnnnnnnnnnnnnnnnnnnntgctgacgctcccaggggtgccaggagccactgggacagggtgaggctcccagacgctcctcgaggtgcccagctctccagggagcttctggcccaaggcnntctngagggatctgctccttaaccccccagtgccttggngagggcaggttccaagccacagacgcctgcccngagtggactntgcggccagtccctggtgccctcctggnccctgctgcccagtgagggntcctancgggtgggttcattggcctgggcccagcgagcccccacctgcattgaccttaggcccatagagagggcctgtcccggtgctgccccagccaggatctggtcgctgccccagggggactgatgggcagagtcgcccctgtggctggactgtgaccatccctgatggggcctgaccgcgggagctgaggaagcgccgctccaccgtctgccctccaaggacccgcatggaggcagtgggctggcagcttcctgctgctccctgtcagagtcaaagcacaaatcctcaggacgggctcaagggccagggcagccgagggaagctccaggtggggaccacgtcttcctgaggttggtgcccactggctgggaccctttgcagtggggtggcctcccctctgtctgcctggtggagggagccgtgggcgtggggacgtgactgaataaagccnccatgggtggatgtgcttggaaaaaanaaaaaaaaaaaaaaaaaaaaaaaaannnnnnaaaaaaaaaaaaaaaa

SEQ ID NO: 513 - DNA, 1248 bp, Homo sapiens
  modified_base (20)..(20): a, c, g, t, unknown, or other
  modified_base (22)..(22): a, c, g, t, unknown, or other
  modified_base (24)..(27): a, c, g, t, unknown, or other
  modified_base (29)..(32): a, c, g, t, unknown, or other
  modified_base (83)..(83): a, c, g, t, unknown, or other
  modified_base (85)..(87): a, c, g, t, unknown, or other
  modified_base (516)..(516): a, c, g, t, unknown, or other
  modified_base (710)..(724): a, c, g, t, unknown, or other
  modified_base (743)..(744): a, c, g, t, unknown, or other
  modified_base (778)..(793): a, c, g, t, unknown, or other
  modified_base (875)..(875): a, c, g, t, unknown, or other
  modified_base (931)..(941): a, c, g, t, unknown, or other
  modified_base (944)..(944): a, c, g, t, unknown, or other
  modified_base (946)..(946): a, c, g, t, unknown, or other
  modified_base (948)..(952): a, c, g, t, unknown, or other
  modified_base (954)..(954): a, c, g, t, unknown, or other
  modified_base (956)..(959): a, c, g, t, unknown, or other
  modified_base (961)..(972): a, c, g, t, unknown, or other
  modified_base (975)..(977): a, c, g, t, unknown, or other
  modified_base (981)..(981): a, c, g, t, unknown, or other
  modified_base (996)..(996): a, c, g, t, unknown, or other
  modified_base (1018)..(1018): a, c, g, t, unknown, or other
  modified_base (1025)..(1025): a, c, g, t, unknown, or other
  modified_base (1067)..(1067): a, c, g, t, unknown, or other
  modified_base (1081)..(1081): a, c, g, t, unknown, or other
  modified_base (1093)..(1093): a, c, g, t, unknown, or other
  modified_base (1095)..(1095): a, c, g, t, unknown, or other
  modified_base (1109)..(1109): a, c, g, t, unknown, or other
  modified_base (1112)..(1113): a, c, g, t, unknown, or other
  modified_base (1115)..(1115): a, c, g, t, unknown, or other
  modified_base (1121)..(1138): a, c, g, t, unknown, or other
  modified_base (1141)..(1141): a, c, g, t, unknown, or other
  modified_base (1143)..(1143): a, c, g, t, unknown, or other
  modified_base (1149)..(1149): a, c, g, t, unknown, or other
  modified_base (1166)..(1166): a, c, g, t, unknown, or other
  modified_base (1168)..(1170): a, c, g, t, unknown, or other
  modified_base (1175)..(1176): a, c, g, t, unknown, or other
  modified_base (1178)..(1179): a, c, g, t, unknown, or other
  modified_base (1188)..(1189): a, c, g, t, unknown, or other
  modified_base (1194)..(1194): a, c, g, t, unknown, or other
  modified_base (1203)..(1203): a, c, g, t, unknown, or other
  modified_base (1207)..(1207): a, c, g, t, unknown, or other
  modified_base (1216)..(1216): a, c, g, t, unknown, or other
  modified_base (1220)..(1220): a, c, g, t, unknown, or other
tttttttttttttttttttntntnnnntnnnntactttttgaaagtttcatttaggtgctatcatttaaaaaatcagaagatntnnnttaagaatccagcattctagtttctttcgaaaaatcagaagatctggcaacactaggcccacattccggcatggcaacaaccagctagagcggtgctggctgttccccctctgtggggcttgtgctctggtttctgaagtcctaaccctcaccaggcccaactgccacctacgccagctgcatggcccctacactgtgtctctgcacgaggcagcccagcaggaaggaacaaaagtgggggtgatgagaggttgtcctgttcagccctccccactacccacaggcctgggcacgtgaaggaggtcagagtagggtgagcaggaaggcagggggggtcccggacaggacacaccccagcctctctctgatcactgtgcatggcaagcagcgtcccaggcaccccacgtgtcctggcccagcccaagcctnccttggcggccgggtggctgcaattgcgtagcttgctgtcttggtcctggccactccacatcctgtcagagctgggcccacgacctgaggccttgtcctgagcctgagcaatatggcctgtaggtacaggcttcctcactgtccatccagctcagctgaatgtgcaccagggtgtggcggtcttgtcacagtcnnnnnnnnnnnnnnngacagtgcagggggccccnnccacagacagggcagtgcgggaagccacatggtnnnnnnnnnnnnnnnngcctccctccctgtccaccttgaactgctcctgtttttgagctgcgatgcgcttctggtccctcttccgccaggctgggtcntgcaggtggcgaaatgtcttgtacccagttgtgattcccgaggggcggaaaagctnnnnnnnnnnnccntnannnnncngnnnnannnnnnnnnnnncgnnncccnagccccagaagcggntggacatcccattgcacagccngtagtgntgcttggagagcagcaggatgccgccgacataggtcttgtantggtagagagggtnggagctccgggnangccacgtggaaggnccnnancctcannnnnnnnnnnnnnnnnntcntngttganagggagcaggtcaacgncnnncatgnnanngtagtccgnnctgtngctgctctncagnaagcccacnttgntgaaccctgcccggtggaactgaagtgg

SEQ ID NO: 514 - DNA, 33 bp, Artificial Sequence
  Description of Artificial Sequence: Synthetic oligonucleotide
aagcagtggtatcaacgcagagtacgcgrgrgr

SEQ ID NO: 515 - DNA, 24 bp, Artificial Sequence
  Description of Artificial Sequence: Synthetic primer
aagcagtggtatcaacgcagagta

SEQ ID NO: 516 - DNA, 27 bp, Artificial Sequence
  Description of Artificial Sequence: Synthetic primer
cggtaatacgactcactatagggagaa

SEQ ID NO: 517 - DNA, 31 bp, Artificial Sequence
  Description of Artificial Sequence: Synthetic oligonucleotide
aagcagtggtatcaacgcagagtacgcgrgr

SEQ ID NO: 518 - DNA, 20 bp, Artificial Sequence
  Description of Artificial Sequence: Synthetic oligonucleotide
gagtgagaggcaacctggag

SEQ ID NO: 519 - DNA, 20 bp, Artificial Sequence
  Description of Artificial Sequence: Synthetic oligonucleotide
gtgaagtgagggctcccata

SEQ ID NO: 520 - DNA, 20 bp, Artificial Sequence
  Description of Artificial Sequence: Synthetic oligonucleotide
ctcaaatctcctccgagacg

SEQ ID NO: 521 - DNA, 20 bp, Artificial Sequence
  Description of Artificial Sequence: Synthetic oligonucleotide
tgaagtggcttggtgtcttg

SEQ ID NO: 522 - DNA, 20 bp, Artificial Sequence
  Description of Artificial Sequence: Synthetic oligonucleotide
agaggtgttccaggtccaga

SEQ ID NO: 523 - DNA, 20 bp, Artificial Sequence
  Description of Artificial Sequence: Synthetic oligonucleotide
gctctggccacaacctaatc

SEQ ID NO: 524 - DNA, 20 bp, Artificial Sequence
  Description of Artificial Sequence: Synthetic oligonucleotide
tgggacattcaattcgacaa

SEQ ID NO: 525 - DNA, 20 bp, Artificial Sequence
  Description of Artificial Sequence: Synthetic oligonucleotide
gagaactggccaacttggag

SEQ ID NO: 526 - DNA, 20 bp, Artificial Sequence
  Description of Artificial Sequence: Synthetic oligonucleotide
ctgcctatcctgtgggagaa

SEQ ID NO: 527 - DNA, 20 bp, Artificial Sequence
  Description of Artificial Sequence: Synthetic oligonucleotide
actggagagccataccgatg

SEQ ID NO: 528 - DNA, 20 bp, Artificial Sequence
  Description of Artificial Sequence: Synthetic oligonucleotide
ggcttctgcagaggacagac

SEQ ID NO: 529 - DNA, 20 bp, Artificial Sequence
  Description of Artificial Sequence: Synthetic oligonucleotide
tcgtcgctgtcttgtagtgc

SEQ ID NO: 530 - DNA, 20 bp, Artificial Sequence
  Description of Artificial Sequence: Synthetic oligonucleotide
agtcgggagaggctaggaag

SEQ ID NO: 531 - DNA, 20 bp, Artificial Sequence
  Description of Artificial Sequence: Synthetic oligonucleotide
gtaccaccttggacccactg

SEQ ID NO: 532 - DNA, 20 bp, Artificial Sequence
  Description of Artificial Sequence: Synthetic oligonucleotide
gctaccgcatcctgagagac

SEQ ID NO: 533 - DNA, 20 bp, Artificial Sequence
  Description of Artificial Sequence: Synthetic oligonucleotide
tcaccttcctcgttgacctc

SEQ ID NO: 534 - DNA, 20 bp, Artificial Sequence
  Description of Artificial Sequence: Synthetic oligonucleotide
ctggtgtctgctaccgtgag

SEQ ID NO: 535 - DNA, 20 bp, Artificial Sequence
  Description of Artificial Sequence: Synthetic oligonucleotide
gggagccagtcagcaaagta

SEQ ID NO: 536 - DNA, 20 bp, Artificial Sequence
  Description of Artificial Sequence: Synthetic oligonucleotide
ggcatcctcaccctgaagta

SEQ ID NO: 537 - DNA, 20 bp, Artificial Sequence
  Description of Artificial Sequence: Synthetic oligonucleotide
ccatctcttgctcgaagtcc

SEQ ID NO: 538 - DNA, 10 bp, Artificial Sequence
  Description of Artificial Sequence: Synthetic oligonucleotide
aaaaaaaaaa

SEQ ID NO: 539 - DNA, 11 bp, Artificial Sequence
  Description of Artificial Sequence: Synthetic oligonucleotide
ttttttttttt

SEQ ID NO: 540 - DNA, 10 bp, Artificial Sequence
  Description of Artificial Sequence: Synthetic oligonucleotide
tttttttttt

1. A method of identifying oocytes that are capable of giving rise to a viable pregnancy when fertilized comprising the following steps:
(i) obtaining at least one cell associated with an oocyte;
(ii) assaying the expression of at least one gene by said cell, the expression of which correlates to the capability of an oocyte associated with said cell to yield a viable pregnancy upon fertilization and transferal into a suitable uterine environment; and
(iii) identifying, based on the level of expression of said at least one gene, whether said oocyte is potentially capable of yielding a viable pregnancy upon fertilization and transferal into a suitable uterine environment.

2. The method of claim 1, wherein said oocyte is a mammalian oocyte.

3. The method of claim 2, wherein said oocyte is a human oocyte.

4. The method of claim 2, wherein said oocyte is a non-human primate oocyte.

5. The method of claim 1 wherein said oocyte associated cell is a cumulus cell.

6. The method of claim 1, wherein the expression of at least 5 genes, the expression of which correlates to the capability of an oocyte to potentially yield a viable pregnancy are identified.

7. The method of claim 6, wherein the expression of at least 10 genes, the expression of which correlates to the capability of an oocyte to potentially yield a viable pregnancy are measured.

8. The method of claim 7, wherein the expression of at least 15 genes, the expression of which correlates to the capability of an oocyte to potentially yield a viable pregnancy are identified.

9. The method of claim 8, wherein the expression of at least 20 genes, the expression of which correlates to the capability of an oocyte to potentially yield a viable pregnancy are identified.

10. The method of claim 9, wherein the expression of at least 20 to 50 genes, the expression of which correlates to the capability of an oocyte to potentially yield a viable pregnancy are identified.

11. The method of claim 10, wherein the expression of at least 50 to 100 genes, the expression of which correlates to the capability of an oocyte to potentially yield a viable pregnancy are identified.

12. The method of claim 1 wherein the method of assaying gene expression uses a method that monitors differential gene expression.

13. The method of claim 12 wherein said method comprises indexing differential display reverse transcriptase polymerase chain reaction (DDRT-PCR)

14. The method of claim 3, wherein the oocyte is obtained from a woman who is at least 25 years old.

15. The method of claim 14, wherein the oocyte is obtained from a woman who is at least 30 years old.

16. The method of claim 15, wherein the oocyte is obtained from a woman who is at least 35 years old.

17. The method of claim 16, wherein the oocyte is obtained from a woman who is at least 40 years old.

18. The method of claim 3, wherein the aberrant expression of said at least one gene is correlated to a condition selected from menopause, cancer, ovarian dysfunction, ovarian cyst, autoimmune disorder and hormonal dysfunction.

19. A method of assessing the efficacy of a fertility treatment comprising:
(i) treating a woman with a putative fertility enhancing treatment;
(ii) obtaining an oocyte from said woman after treatment and measuring the expression of at least one gene by a cell obtained from said oocyte, the expression of which positively or negatively correlates to the capability of an oocyte cell to yield a viable pregnancy upon fertilization and transferal to a suitable uterine environment; and
(iii) evaluating whether said treatment is effective based on the level of expression of said at least one gene.

20. The method of claim 19, wherein said fertility treatment comprises hormonal therapy.

21. The method of claim 20, wherein the subject is menopausal and the treatment comprises hormone replacement therapy.

22. The method of claim 1, wherein gene expression is detected by real-time polymerase chain reaction (RT-PCR).

23. The method of claim 19, wherein gene expression is detected by RT-PCR.

24. The method of claim 19 wherein gene expression is detected differentially by indexing differential display reverse transcriptase polymerase chain reaction (DDRT-PCR).

25. The method of claim 19 wherein said cell is a cumulus cell.

26. A method of evaluating fertility potential in a subject comprising comparing the expression levels of specific genes in a cell obtained from an oocyte, wherein said genes are expressed at characteristic levels (upregulated or downregulated) in an oocyte capable of yielding a viable pregnancy; and determining whether said subject is potentially “pregnancy competent” based on whether a cell derived from an oocyte of said subject expresses one or more pregnancy signature genes at levels characteristic of pregnancy competent oocytes.

27. The method of claim 26 wherein said cell is a cumulus cell.

28. The method of claim 26 wherein said method monitors differential gene expression by indexing differential display reverse transcriptase polymerase chain reaction (DDRT-PCR).

29. The method of claim 1 wherein gene expression is detected using antibodies that specifically bind to “pregnancy signature” polypeptides.

30. An array of at least two different polynucleotide sequences or polypeptides encoded thereby the levels of expression or absence of expression correlate to the pregnancy potential of a mammalian oocyte expressing said polynucleotide sequences or polypeptides.

31. The array of claim 30 which is a polynucleotide sequence array.

32. The array of claim 30 which is a polypeptide array.

33. The array of claim 31 which comprises at least 10 polynucleotide sequences.

34. The array of claim 32 which comprises at least 10 polypeptides.

35. A method of using an array according to claim 30 to detect whether a cell expresses pregnancy signature genes.

36. A method of using an array according to claim 30 to determine the efficiency of a fertility treatment by detecting whether cells obtained from a fertility treatment subject express one or more nucleic acid or polypeptides contained in said array.

37. The array of claim 30 which is comprised on a filter or glass chip.

38. The array of claim 37 which comprised a detectable label.

39. The array of claim 38 wherein said label is a fluorophore.

40. An improved method for identifying the genes which are differentially expressed by a particular cell sample (whole genome transcriptome analysis) which method includes the amplification of total RNA from a cell sample wherein the improvement comprises:
effecting RNA amplification by a protocol which combines template-switching polymerase chain reaction (PCR) and T7-based amplification methods.

41. The method of claim 40 wherein first strand cDNA synthesis is effected by contacting total RNA from a cell sample with a T7 promoter primer, denaturing, and the addition of a SMART II oligonucleotide.

42. The method of claim 41 wherein the T7 promoter primer is an anchored T7-oligo (dT)₂₄ V promoter primer.

43. The method of claim 41 wherein the SMART II oligonucleotide is 5′-AAGCAGTGGTATCAACGCAGAGTACGCGrGr-3′ (SEQ ID NO: 517).

44. The method of claim 41 wherein after first strand cDNA synthesis is completed double stranded cDNA synthesis is effected by long-distance (LD-PCR).

45. The method of claim 44 wherein LD-PCR is effected by contacting the product of first strand cDNA synthesis with a 5′ SMART upper primer and a 3′ SMART lower primer and effecting a number of thermal cycles wherein each cycle each includes denaturation, annealing and extension steps.

46. The method of claim 45 wherein the number of thermal cycles ranges from 5 to 50.

47. The method of claim 46 wherein the number of thermal cycles ranges from 10-30.

48. The method of claim 8 wherein about 15 thermal cycles are effected.

49. The method of claim 47 wherein after second strand synthesis is effected by LD-PCR the resultant transcription product obtained from the cell sample is probed in order to identify the expressed genes contained therein.

50. The method of claim 49 wherein said probing is effected using a gene chip containing a set of genes specific to the cell sample.

51. The method of claim 50 wherein the gene chip comprises genes from the human genome or a defined subset thereof.

52. The method of claim 51 wherein the expression data is analyzed by dChip, MAS 5.0 or Robust MultiArray Average (RMA) based methods.

53. The method of claim 52 wherein the raw data is normalized prior to obtaining model-based gene expression indices or signals for the cell sample.

54. The method of claim 52 wherein the genes which are expressed greater than the baseline average are identified.

55. The method of claim 54 wherein the genes which are expressed at least 1.5-5 times greater than baseline are identified.

56. The method of claim 55 wherein the genes expressed at least 2 times baseline are identified.

57. The method of claim 40 wherein the cell sample is that of an oocyte, embryonic stem cell (ESC), primordial germ cell, sperm cell, oocyte or cumulus cell.

58. The method of claim 40 wherein the cell sample is from an oocyte, cumulus cell, or ESC.

59. The method of claim 58 wherein the cell sample is from a human oocyte, ES cell, or cumulus cell.

60. The method of claim 59 wherein the cell sample is from a human metaphase II oocyte.

61. The method of claim 60 wherein the set of expressed genes is used to identify a set of genes which are or are not expressed in pregnancy competent oocytes.

62. The method of claim 61 wherein the genes are selected from those contained in FIG. 4.

63. The method of claim 61 wherein the genes are selected from those contained in FIG. 5.
